United States Patent Application Publication US 2023/0330215 A1 - sequence listing, part 3

SEQ ID NO: 19240 - protein, 11 aa, Severe acute respiratory syndrome coronavirus 2
  REGION 1..11: note = Table B: HLA-DRB1*01:02L HLA-DPA1*01:03-B1*03:01L HLA-DRB1*12:01L HLA-DPA1*01:03-B1*02:01L HLA-DRB1*15:03L
SWQTGDFVKAT

SEQ ID NO: 19241 - protein, 14 aa, Severe acute respiratory syndrome coronavirus 2
  REGION 1..14: note = Table B: HLA-DRB1*01:02L HLA-DRB1*15:03L
TGDFVKATCEFCGT

SEQ ID NO: 19242 - protein, 14 aa, Severe acute respiratory syndrome coronavirus 2
  REGION 1..14: note = Table B: HLA-DRB1*01:02L HLA-DRB1*15:03L
GTENLTKEGATTCG

SEQ ID NO: 19243 - protein, 14 aa, Severe acute respiratory syndrome coronavirus 2
  REGION 1..14: note = Table B: HLA-DRB1*01:02L HLA-DRB1*15:03L
TENLTKEGATTCGY

SEQ ID NO: 19244 - protein, 14 aa, Severe acute respiratory syndrome coronavirus 2
  REGION 1..14: note = Table B: HLA-DRB1*01:02L
ENLTKEGATTCGYL

SEQ ID NO: 19245 - protein, 14 aa, Severe acute respiratory syndrome coronavirus 2
  REGION 1..14: note = Table B: HLA-DRB1*01:02L
HNESGLKTILRKGG

SEQ ID NO: 19246 - protein, 12 aa, Severe acute respiratory syndrome coronavirus 2
  REGION 1..12: note = Table B: HLA-DRB1*01:02L HLA-DRB1*14:01L HLA-DRB1*11:04L HLA-DRB1*08:01L HLA-DRB1*11:01L
SGLKTILRKGGR

SEQ ID NO: 19247 - protein, 14 aa, Severe acute respiratory syndrome coronavirus 2
  REGION 1..14: note = Table B: HLA-DRB1*01:02L HLA-DRB1*08:01L
HNKCAYWVPRASAN

SEQ ID NO: 19248 - protein, 14 aa, Severe acute respiratory syndrome coronavirus 2
  REGION 1..14: note = Table B: HLA-DRB1*01:02L
ANIGCNHTGVVGEG

SEQ ID NO: 19249 - protein, 15 aa, Severe acute respiratory syndrome coronavirus 2
  REGION 1..15: note = Table B: HLA-DRB1*01:02L HLA-DRB1*15:03L
GSEGLNDNLLEILQK

SEQ ID NO: 19250 - protein, 15 aa, Severe acute respiratory syndrome coronavirus 2
  REGION 1..15: note = Table B: HLA-DRB1*01:02L HLA-DPA1*01:03-B1*04:02L HLA-DRB1*16:01L HLA-DRB1*15:03L
SEGLNDNLLEILQKE

SEQ ID NO: 19251 - protein, 13 aa, Severe acute respiratory syndrome coronavirus 2
  REGION 1..13: note = Table B: HLA-DRB1*01:02L HLA-DRB1*16:01L
LNDNLLEILQKEK

SEQ ID NO: 19252 - protein, 13 aa, Severe acute respiratory syndrome coronavirus 2
  REGION 1..13: note = Table B: HLA-DRB1*01:02L
EKVNINIVGDFKL

SEQ ID NO: 19253 - protein, 13 aa, Severe acute respiratory syndrome coronavirus 2
  REGION 1..13: note = Table B: HLA-DRB1*01:02L HLA-DPA1*01:03-B1*03:01L
GDFKLNEEIAIIL

SEQ ID NO: 19254 - protein, 12 aa, Severe acute respiratory syndrome coronavirus 2
  REGION 1..12: note = Table B: HLA-DRB1*01:02L
KLNEEIAIILAS

SEQ ID NO: 19255 - protein, 13 aa, Severe acute respiratory syndrome coronavirus 2
  REGION 1..13: note = Table B: HLA-DRB1*01:02L HLA-DRB1*16:01L
AIILASFSASTSA

SEQ ID NO: 19256 - protein, 13 aa, Severe acute respiratory syndrome coronavirus 2
  REGION 1..13: note = Table B: HLA-DRB1*01:02L HLA-DRB1*12:01L HLA-DQA1*03:01-B1*03:02L
IILASFSASTSAF

SEQ ID NO: 19257 - protein, 12 aa, Severe acute respiratory syndrome coronavirus 2
  REGION 1..12: note = Table B: HLA-DRB1*01:02L HLA-DRB1*08:04L HLA-DRB3*02:01L HLA-DRB1*11:04L HLA-DRB1*04:08L
SAFVETVKGLDY

SEQ ID NO: 19258 - protein, 12 aa, Severe acute respiratory syndrome coronavirus 2
  REGION 1..12: note = Table B: HLA-DRB1*01:02L HLA-DRB1*15:03L
QIVESCGNFKVT

SEQ ID NO: 19259 - protein, 12 aa, Severe acute respiratory syndrome coronavirus 2
  REGION 1..12: note = Table B: HLA-DRB1*01:02L
IVESCGNFKVTK

SEQ ID NO: 19260 - protein, 16 aa, Severe acute respiratory syndrome coronavirus 2
  REGION 1..16: note = Table B: HLA-DRB1*01:02L
VTKGKAKKGAWNIGEQ

SEQ ID NO: 19261 - protein, 14 aa, Severe acute respiratory syndrome coronavirus 2
  REGION 1..14: note = Table B: HLA-DRB1*01:02L
KAKKGAWNIGEQKS

SEQ ID NO: 19262 - protein, 15 aa, Severe acute respiratory syndrome coronavirus 2
  REGION 1..15: note = Table B: HLA-DRB1*01:02L
AKKGAWNIGEQKSIL

SEQ ID NO: 19263 - protein, 13 aa, Severe acute respiratory syndrome coronavirus 2
  REGION 1..13: note = Table B: HLA-DRB1*01:02L HLA-DRB1*12:01L HLA-DPA1*03:01-B1*105:01L HLA-DQA1*05:05-B1*03:01L HLA-DRB1*15:03L
WNIGEQKSILSPL

SEQ ID NO: 19264 - protein, 11 aa, Severe acute respiratory syndrome coronavirus 2
  REGION 1..11: note = Table B: HLA-DRB1*01:02L HLA-DRB1*08:77L HLA-DRB3*02:01L
YAFASEAARVV

SEQ ID NO: 19265 - protein, 14 aa, Severe acute respiratory syndrome coronavirus 2
  REGION 1..14: note = Table B: HLA-DRB1*01:02L
ASEAARVVRSIFSR

SEQ ID NO: 19266 - protein, 14 aa, Severe acute respiratory syndrome coronavirus 2
  REGION 1..14: note = Table B: HLA-DRB1*01:02L
SEAARVVRSIFSRT

SEQ ID NO: 19267 - protein, 11 aa, Severe acute respiratory syndrome coronavirus 2
  REGION 1..11: note = Table B: HLA-DRB1*01:02L HLA-DRB1*12:01L HLA-DRB1*15:03L
RVVRSIFSRTL

SEQ ID NO: 19268 - protein, 11 aa, Severe acute respiratory syndrome coronavirus 2
  REGION 1..11: note = Table B: HLA-DRB1*01:02L HLA-DRB1*15:03L
VVRSIFSRTLE

SEQ ID NO: 19269 - protein, 13 aa, Severe acute respiratory syndrome coronavirus 2
  REGION 1..13: note = Table B: HLA-DRB1*01:02L HLA-DPA1*01:03-B1*03:01L HLA-DPA1*02:01-B1*13:01L HLA-DRB1*15:03L
SVRVLQKAAITIL

SEQ ID NO: 19270 - protein, 12 aa, Severe acute respiratory syndrome coronavirus 2
  REGION 1..12: note = Table B: HLA-DRB1*01:02L HLA-DRB3*02:01L
AAITILDGISQY

SEQ ID NO: 19271 - protein, 13 aa, Severe acute respiratory syndrome coronavirus 2
  REGION 1..13: note = Table B: HLA-DRB1*01:02L
LDGISQYSLRLID

SEQ ID NO: 19272 - protein, 12 aa, Severe acute respiratory syndrome coronavirus 2
  REGION 1..12: note = Table B: HLA-DRB1*01:02L
YSLRLIDAMMFT

SEQ ID NO: 19273 - protein, 12 aa, Severe acute respiratory syndrome coronavirus 2
  REGION 1..12: note = Table B: HLA-DRB1*01:02L HLA-DRB1*14:01L HLA-DRB1*12:01L
LRLIDAMMFTSD

SEQ ID NO: 19274 - protein, 14 aa, Severe acute respiratory syndrome coronavirus 2
  REGION 1..14: note = Table B: HLA-DRB1*01:02L
TSDLATNNLVVMAY

SEQ ID NO: 19275 - protein, 12 aa, Severe acute respiratory syndrome coronavirus 2
  REGION 1..12: note = Table B: HLA-DRB1*01:02L
VYEKLKPVLDWL

SEQ ID NO: 19276 - protein, 13 aa, Severe acute respiratory syndrome coronavirus 2
  REGION 1..13: note = Table B: HLA-DRB1*01:02L HLA-DRB1*12:01L HLA-DRB1*16:01L HLA-DRB1*04:08L
PVLDWLEEKFKEG

SEQ ID NO: 19277 - protein, 12 aa, Severe acute respiratory syndrome coronavirus 2
  REGION 1..12: note = Table B: HLA-DRB1*01:02L HLA-DRB1*08:04L HLA-DRB1*08:01L HLA-DRB1*11:01L HLA-DRB1*12:01L HLA-DPA1*02:01-B1*13:01L HLA-DPA1*01:03-B1*02:01L HLA-DQA1*01:03-B1*06:01L HLA-DQA1*02:01-B1*03:03L HLA-DRB1*15:03L
DWLEEKFKEGVE

SEQ ID NO: 19278 - protein, 13 aa, Severe acute respiratory syndrome coronavirus 2
  REGION 1..13: note = Table B: HLA-DRB1*01:02L
EEKFKEGVEFLRD

SEQ ID NO: 19279 - protein, 13 aa, Severe acute respiratory syndrome coronavirus 2
  REGION 1..13: note = Table B: HLA-DRB1*01:02L HLA-DPA1*01:03-B1*03:01L HLA-DPA1*03:01-B1*04:02L HLA-DQA1*05:01-B1*02:01L
FKEGVEFLRDGWE

SEQ ID NO: 19280 - protein, 14 aa, Severe acute respiratory syndrome coronavirus 2
  REGION 1..14: note = Table B: HLA-DRB1*01:02L HLA-DRB1*15:03L
VKFISTCACEIVGG

SEQ ID NO: 19281 - protein, 14 aa, Severe acute respiratory syndrome coronavirus 2
  REGION 1..14: note = Table B: HLA-DRB1*01:02L HLA-DPA1*01:03-B1*04:02L
KFISTCACEIVGGQ

SEQ ID NO: 19282 - protein, 14 aa, Severe acute respiratory syndrome coronavirus 2
  REGION 1..14: note = Table B: HLA-DRB1*01:02L HLA-DRB1*08:04L HLA-DRB1*14:01L HLA-DPA1*03:01-B1*105:01L HLA-DRB1*15:03L
QIVTCAKEIKESVQ

SEQ ID NO: 19283 - protein, 12 aa, Severe acute respiratory syndrome coronavirus 2
  REGION 1..12: note = Table B: HLA-DRB1*01:02L
KEIKESVQTFFK

SEQ ID NO: 19284 - protein, 14 aa, Severe acute respiratory syndrome coronavirus 2
  REGION 1..14: note = Table B: HLA-DRB1*01:02L
EIKESVQTFFKLVN

SEQ ID NO: 19285 - protein, 12 aa, Severe acute respiratory syndrome coronavirus 2
  REGION 1..12: note = Table B: HLA-DRB1*01:02L HLA-DRB1*14:01L HLA-DRB1*08:01L HLA-DRB1*12:01L HLA-DRB1*04:08L
QTFFKLVNKFLA

SEQ ID NO: 19286 - protein, 11 aa, Severe acute respiratory syndrome coronavirus 2
  REGION 1..11: note = Table B: HLA-DRB1*01:02L HLA-DRB1*14:02L
FFKLVNKFLAL

SEQ ID NO: 19287 - protein, 13 aa, Severe acute respiratory syndrome coronavirus 2
  REGION 1..13: note = Table B: HLA-DRB1*01:02L HLA-DPA1*03:01-B1*04:02L HLA-DRB1*12:01L HLA-DPA1*02:01-B1*13:01L HLA-DPA1*03:01-B1*105:01L HLA-DRB1*16:01L HLA-DRB1*15:03L
VNKFLALCADSII

SEQ ID NO: 19288 - protein, 14 aa, Severe acute respiratory syndrome coronavirus 2
  REGION 1..14: note = Table B: HLA-DRB1*01:02L HLA-DRB1*12:01L HLA-DRB1*16:01L
NKFLALCADSIIIG

SEQ ID NO: 19289 - protein, 14 aa, Severe acute respiratory syndrome coronavirus 2
  REGION 1..14: note = Table B: HLA-DRB1*01:02L
KFLALCADSIIIGG

SEQ ID NO: 19290 - protein, 14 aa, Severe acute respiratory syndrome coronavirus 2
  REGION 1..14: note = Table B: HLA-DRB1*01:02L HLA-DPA1*01:03-B1*03:01L HLA-DRB1*12:01L HLA-DPA1*03:01-B1*105:01L
AKLKALNLGETFVT

SEQ ID NO: 19291 - protein, 13 aa, Severe acute respiratory syndrome coronavirus 2
  REGION 1..13: note = Table B: HLA-DRB1*01:02L HLA-DQA1*05:05-B1*03:19L
LNLGETFVTHSKG

SEQ ID NO: 19292 - protein, 13 aa, Severe acute respiratory syndrome coronavirus 2
  REGION 1..13: note = Table B: HLA-DRB1*01:02L
SKGLYRKCVKSRE

SEQ ID NO: 19293 - protein, 13 aa, Severe acute respiratory syndrome coronavirus 2
  REGION 1..13: note = Table B: HLA-DRB1*01:02L
KGLYRKCVKSREE

SEQ ID NO: 19294 - protein, 13 aa, Severe acute respiratory syndrome coronavirus 2
  REGION 1..13: note = Table B: HLA-DRB1*01:02L HLA-DRB1*12:01L
PKEIIFLEGETLP

SEQ ID NO: 19295 - protein, 17 aa, Severe acute respiratory syndrome coronavirus 2
  REGION 1..17: note = Table B: HLA-DRB1*01:02L HLA-DRB1*08:01L HLA-DRB1*04:10L HLA-DRB1*15:03L
QPLEQPTSEAVEAPLVG

SEQ ID NO: 19296 - protein, 13 aa, Severe acute respiratory syndrome coronavirus 2
  REGION 1..13: note = Table B: HLA-DRB1*01:02L HLA-DPA1*03:01-B1*105:01L HLA-DRB1*16:01L HLA-DRB1*15:03L
EKYCALAPNMMVT

SEQ ID NO: 19297 - protein, 13 aa, Severe acute respiratory syndrome coronavirus 2
  REGION 1..13: note = Table B: HLA-DRB1*01:02L
LAPNMMVTNNTFT

SEQ ID NO: 19298 - protein, 12 aa, Severe acute respiratory syndrome coronavirus 2
  REGION 1..12: note = Table B: HLA-DRB1*01:02L
MMVTNNTFTLKG

SEQ ID NO: 19299 - protein, 13 aa, Severe acute respiratory syndrome coronavirus 2
  REGION 1..13: note = Table B: HLA-DRB1*01:02L HLA-DPA1*02:01-B1*13:01L HLA-DPA1*01:02-B1*04:01L
FGDDTVIEVQGYK

SEQ ID NO: 19300 - protein, 13 aa, Severe acute respiratory syndrome coronavirus 2
  REGION 1..13: note = Table B: HLA-DRB1*01:02L HLA-DRB1*15:03L
ERIDKVLNEKCSA

SEQ ID NO: 19301 - protein, 13 aa, Severe acute respiratory syndrome coronavirus 2
  REGION 1..13: note = Table B: HLA-DRB1*01:02L HLA-DPA1*01:03-B1*03:01L HLA-DRB1*14:01L HLA-DRB1*12:01L HLA-DPA1*02:01-B1*13:01L HLA-DPA1*03:01-B1*105:01L HLA-DQA1*03:01-B1*03:02L HLA-DRB1*16:01L HLA-DQA1*01:03-B1*06:01L HLA-DRB1*15:03L
IDKVLNEKCSAYT

SEQ ID NO: 19302 - protein, 14 aa, Severe acute respiratory syndrome coronavirus 2
  REGION 1..14: note = Table B: HLA-DRB1*01:02L HLA-DPA1*03:01-B1*105:01L HLA-DQA1*01:03-B1*06:01L HLA-DRB1*15:03L
DKVLNEKCSAYTVE

SEQ ID NO: 19303 - protein, 12 aa, Severe acute respiratory syndrome coronavirus 2
  REGION 1..12: note = Table B: HLA-DRB1*01:02L HLA-DRB1*12:01L HLA-DRB1*10:01L HLA-DRB1*16:01L HLA-DRB1*15:03L
AYTVELGTEVNE

SEQ ID NO: 19304 - protein, 13 aa, Severe acute respiratory syndrome coronavirus 2
  REGION 1..13: note = Table B: HLA-DRB1*01:02L
YTVELGTEVNEFA

SEQ ID NO: 19305 - protein, 15 aa, Severe acute respiratory syndrome coronavirus 2
  REGION 1..15: note = Table B: HLA-DRB1*01:02L HLA-DPA1*01:03-B1*03:01L HLA-DRB1*12:01L HLA-DPA1*02:01-B1*13:01L HLA-DQA1*05:05-B1*03:01L HLA-DRB1*04:08L HLA-DRB1*15:03L
QPVSELLTPLGIDLD

SEQ ID NO: 19306 - protein, 12 aa, Severe acute respiratory syndrome coronavirus 2
  REGION 1..12: note = Table B: HLA-DRB1*01:02L HLA-DRB1*12:01L HLA-DRB1*04:08L
FDESGEFKLASH

SEQ ID NO: 19307 - protein, 13 aa, Severe acute respiratory syndrome coronavirus 2
  REGION 1..13: note = Table B: HLA-DRB1*01:02L HLA-DRB1*08:04L HLA-DRB3*02:01L HLA-DRB1*08:01L HLA-DRB1*04:08L
DESGEFKLASHMY

SEQ ID NO: 19308 - protein, 14 aa, Severe acute respiratory syndrome coronavirus 2
  REGION 1..14: note = Table B: HLA-DRB1*01:02L
ESGEFKLASHMYCS

SEQ ID NO: 19309 - protein, 16 aa, Severe acute respiratory syndrome coronavirus 2
  REGION 1..16: note = Table B: HLA-DRB1*01:02L HLA-DPA1*01:03-B1*02:01L HLA-DRB1*04:08L
GEFKLASHMYCSFYPP

SEQ ID NO: 19310 - protein, 12 aa, Severe acute respiratory syndrome coronavirus 2
  REGION 1..12: note = Table B: HLA-DRB1*01:02L HLA-DRB3*02:01L HLA-DRB1*14:01L HLA-DRB1*08:01L HLA-DPA1*01:03-B1*04:01L HLA-DRB1*04:10L HLA-DRB1*12:02L HLA-DPA1*02:01-B1*13:01L HLA-DRB1*14:54L HLA-DRB1*07:01L HLA-DRB1*10:01L HLA-DRB1*04:08L
GTEDDYQGKPLE

SEQ ID NO: 19311 - protein, 13 aa, Severe acute respiratory syndrome coronavirus 2
  REGION 1..13: note = Table B: HLA-DRB1*01:02L HLA-DRB1*08:04L
TEDDYQGKPLEFG

SEQ ID NO: 19312 - protein, 14 aa, Severe acute respiratory syndrome coronavirus 2
  REGION 1..14: note = Table B: HLA-DRB1*01:02L
EFGATSAALQPEEE

SEQ ID NO: 19313 - protein, 16 aa, Severe acute respiratory syndrome coronavirus 2
  REGION 1..16: note = Table B: HLA-DRB1*01:02L HLA-DPA1*01:03-B1*04:02L
EEDWLDDDSQQTVGQQ

SEQ ID NO: 19314 - protein, 12 aa, Severe acute respiratory syndrome coronavirus 2
  REGION 1..12: note = Table B: HLA-DRB1*01:02L HLA-DPA1*01:03-B1*03:01L
TIVEVQPQLEME

SEQ ID NO: 19315 - protein, 12 aa, Severe acute respiratory syndrome coronavirus 2
  REGION 1..12: note = Table B: HLA-DRB1*01:02L HLA-DRB3*02:01L HLA-DRB1*12:02L HLA-DQA1*03:01-B1*03:02L HLA-DQA1*05:05-B1*03:01L
VQTIEVNSFSGY

SEQ ID NO: 19316 - protein, 11 aa, Severe acute respiratory syndrome coronavirus 2
  REGION 1..11: note = Table B: HLA-DRB1*01:02L HLA-DRB3*02:01L
SGYLKLTDNVY

SEQ ID NO: 19317 - protein, 11 aa, Severe acute respiratory syndrome coronavirus 2
  REGION 1..11: note = Table B: HLA-DRB1*01:02L
GYLKLTDNVYI

SEQ ID NO: 19318 - protein, 10 aa, Severe acute respiratory syndrome coronavirus 2
  REGION 1..10: note = Table B: HLA-DRB1*01:02L HLA-DRB1*12:01L HLA-DRB1*16:01L HLA-DQA1*02:01-B1*03:03L HLA-DRB1*15:03L
LKLTDNVYIK

SEQ ID NO: 19319 - protein, 14 aa, Severe acute respiratory syndrome coronavirus 2
  REGION 1..14: note = Table B: HLA-DRB1*01:02L
KNADIVEEAKKVKP

SEQ ID NO: 19320 - protein, 12 aa, Severe acute respiratory syndrome coronavirus 2
  REGION 1..12: note = Table B: HLA-DRB1*01:02L HLA-DPA1*01:03-B1*03:01L HLA-DRB1*08:01L HLA-DPA1*01:03-B1*04:02L
GVAGALNKATNN

SEQ ID NO: 19321 - protein, 15 aa, Severe acute respiratory syndrome coronavirus 2
  REGION 1..15: note = Table B: HLA-DRB1*01:02L HLA-DRB1*04:10L HLA-DRB1*12:01L
LNKATNNAMQVESDD

SEQ ID NO: 19322 - protein, 14 aa, Severe acute respiratory syndrome coronavirus 2
  REGION 1..14: note = Table B: HLA-DRB1*01:02L HLA-DRB1*08:01L
HNLAKHCLHVVGPN

SEQ ID NO: 19323 - protein, 14 aa, Severe acute respiratory syndrome coronavirus 2
  REGION 1..14: note = Table B: HLA-DRB1*01:02L HLA-DPA1*02:01-B1*13:01L
LAKHCLHVVGPNVN

SEQ ID NO: 19324 - protein, 14 aa, Severe acute respiratory syndrome coronavirus 2
  REGION 1..14: note = Table B: HLA-DRB1*01:02L HLA-DRB1*04:08L
AKHCLHVVGPNVNK

SEQ ID NO: 19325 - protein, 13 aa, Severe acute respiratory syndrome coronavirus 2
  REGION 1..13: note = Table B: HLA-DRB1*01:02L HLA-DQA1*05:05-B1*03:19L HLA-DPA1*03:01-B1*105:01L
LHVVGPNVNKGED

SEQ ID NO: 19326 - protein, 13 aa, Severe acute respiratory syndrome coronavirus 2
  REGION 1..13: note = Table B: HLA-DRB1*01:02L HLA-DRB1*08:04L HLA-DRB1*08:77L HLA-DRB3*02:01L HLA-DPA1*03:01-B1*04:02L HLA-DRB1*14:01L HLA-DRB1*11:03L HLA-DRB1*11:04L HLA-DRB1*14:02L HLA-DRB1*08:01L HLA-DRB1*11:01L HLA-DRB5*01:01L HLA-DPA1*01:03-B1*04:01L
  REGION 1..13: note = CONT. FROM ABOVE: HLA-DQA1*05:05-B1*03:116L HLA-DRB1*04:10L HLA- DRB1*09:01L HLA-DPA1*01:03-B1*04:02L HLA-DRB1*12:02L HLA-DRB3*01 :01L HLA-DPA1*02:01-B1*13:01L HLA-DPA1*01:03-B1*104:01L HLA-DPA1 *01:02-B1*04:01L HLA-DRB1*07:01L HLA-DRB1*10:01L HLA-DRB1*04:08L
  REGION 1..13: note = CONT. FROM ABOVE: HLA-DRB1*08:03L HLA-DRB1*15:03L
VVGPNVNKGEDIQ

SEQ ID NO: 19327 - protein, 14 aa, Severe acute respiratory syndrome coronavirus 2
  REGION 1..14: note = Table B: HLA-DRB1*01:02L HLA-DRB1*15:03L
NFNQHEVLLAPLLS

SEQ ID NO: 19328 - protein, 13 aa, Severe acute respiratory syndrome coronavirus 2
  REGION 1..13: note = Table B: HLA-DRB1*01:02L
VLLAPLLSAGIFG

SEQ ID NO: 19329 - protein, 14 aa, Severe acute respiratory syndrome coronavirus 2
  REGION 1..14: note = Table B: HLA-DRB1*01:02L
SLRVCVDTVRTNVY

SEQ ID NO: 19330 - protein, 14 aa, Severe acute respiratory syndrome coronavirus 2
  REGION 1..14: note = Table B: HLA-DRB1*01:02L HLA-DPA1*01:03-B1*03:01L HLA-DRB1*14:01L HLA-DPA1*01:03-B1*04:02L HLA-DRB1*12:01L HLA-DPA1*02:01-B1*13:01L HLA-DPA1*01:03-B1*104:01L HLA-DQA1*05:05-B1*03:01L
VDTVRTNVYLAVFD

SEQ ID NO: 19331 - protein, 15 aa, Severe acute respiratory syndrome coronavirus 2
  REGION 1..15: note = Table B: HLA-DRB1*01:02L
ITESKPSVEQRKQDD

SEQ ID NO: 19332 - protein, 14 aa, Severe acute respiratory syndrome coronavirus 2
  REGION 1..14: note = Table B: HLA-DRB1*01:02L
PSVEQRKQDDKKIK

SEQ ID NO: 19333 - protein, 11 aa, Severe acute respiratory syndrome coronavirus 2
  REGION 1..11: note = Table B: HLA-DRB1*01:02L HLA-DRB1*03:01L HLA-DRB1*09:01L HLA-DRB1*08:02L
EVTTTLEETKF

SEQ ID NO: 19334 - protein, 12 aa, Severe acute respiratory syndrome coronavirus 2
  REGION 1..12: note = Table B: HLA-DRB1*01:02L HLA-DRB1*14:01L
ETKFLTENLLLY

SEQ ID NO: 19335 - protein, 14 aa, Severe acute respiratory syndrome coronavirus 2
  REGION 1..14: note = Table B: HLA-DRB1*01:02L HLA-DQA1*01-B1*05L HLA-DRB1*16:01L
NLLLYIDINGNLHP

SEQ ID NO: 19336 - protein, 13 aa, Severe acute respiratory syndrome coronavirus 2
  REGION 1..13: note = Table B: HLA-DRB1*01:02L HLA-DPA1*01:03-B1*03:01L HLA-DRB1*15:03L
IDINGNLHPDSAT

SEQ ID NO: 19337 - protein, 14 aa, Severe acute respiratory syndrome coronavirus 2
  REGION 1..14: note = Table B: HLA-DRB1*01:02L HLA-DRB1*16:01L
ATLVSDIDITFLKK

SEQ ID NO: 19338 - protein, 14 aa, Severe acute respiratory syndrome coronavirus 2
  REGION 1..14: note = Table B: HLA-DRB1*01:02L HLA-DRB1*03:01L
TLVSDIDITFLKKD

SEQ ID NO: 19339 - protein, 12 aa, Severe acute respiratory syndrome coronavirus 2
  REGION 1..12: note = Table B: HLA-DRB1*01:02L
GTTEMLAKALRK

SEQ ID NO: 19340 - protein, 14 aa, Severe acute respiratory syndrome coronavirus 2
  REGION 1..14: note = Table B: HLA-DRB1*01:02L HLA-DRB1*12:01L HLA-DRB1*16:01L HLA-DRB1*15:03L
TTEMLAKALRKVPT

SEQ ID NO: 19341 - protein, 14 aa, Severe acute respiratory syndrome coronavirus 2
  REGION 1..14: note = Table B: HLA-DRB1*01:02L
TEMLAKALRKVPTD

SEQ ID NO: 19342 - protein, 14 aa, Severe acute respiratory syndrome coronavirus 2
  REGION 1..14: note = Table B: HLA-DRB1*01:02L HLA-DRB1*08:04L HLA-DRB1*14:01L HLA-DQA1*01:03-B1*06:01L HLA-DRB1*04:08L HLA-DQA1*02:01-B1*03:03L
EMLAKALRKVPTDN

SEQ ID NO: 19343 - protein, 12 aa, Severe acute respiratory syndrome coronavirus 2
  REGION 1..12: note = Table B: HLA-DRB1*01:02L
AKALRKVPTDNY

SEQ ID NO: 19344 - protein, 15 aa, Severe acute respiratory syndrome coronavirus 2
  REGION 1..15: note = Table B: HLA-DRB1*01:02L
KTVLKKCKSAFYILP

SEQ ID NO: 19345 - protein, 14 aa, Severe acute respiratory syndrome coronavirus 2
  REGION 1..14: note = Table B: HLA-DRB1*01:02L HLA-DRB1*08:01L HLA-DRB1*04:08L
VSWNLREMLAHAEE

SEQ ID NO: 19346 - protein, 15 aa, Severe acute respiratory syndrome coronavirus 2
  REGION 1..15: note = Table B: HLA-DRB1*01:02L
RKLMPVCVETKAIVS

SEQ ID NO: 19347 - protein, 16 aa, Severe acute respiratory syndrome coronavirus 2
  REGION 1..16: note = Table B: HLA-DRB1*01:02L
MPVCVETKAIVSTIQR

SEQ ID NO: 19348 - protein, 13 aa, Severe acute respiratory syndrome coronavirus 2
  REGION 1..13: note = Table B: HLA-DRB1*01:02L
VETKAIVSTIQRK

SEQ ID NO: 19349 - protein, 12 aa, Severe acute respiratory syndrome coronavirus 2
  REGION 1..12: note = Table B: HLA-DRB1*01:02L HLA-DRB1*12:01L HLA-DRB1*16:01L HLA-DRB1*15:03L
TIQRKYKGIKIQ

SEQ ID NO: 19350 - protein, 14 aa, Severe acute respiratory syndrome coronavirus 2
  REGION 1..14: note = Table B: HLA-DRB1*01:02L
EGVVDYGARFYFYT

SEQ ID NO: 19351 - protein, 14 aa, Severe acute respiratory syndrome coronavirus 2
  REGION 1..14: note = Table B: HLA-DRB1*01:02L
VVDYGARFYFYTSK

SEQ ID NO: 19352 - protein, 13 aa, Severe acute respiratory syndrome coronavirus 2
  REGION 1..13: note = Table B: HLA-DRB1*01:02L HLA-DPA1*02:01-B1*13:01L
INTLNDLNETLVT

SEQ ID NO: 19353 - protein, 13 aa, Severe acute respiratory syndrome coronavirus 2
  REGION 1..13: note = Table B: HLA-DRB1*01:02L HLA-DRB1*08:01L HLA-DRB1*04:08L
YVTHGLNLEEAAR

SEQ ID NO: 19354 - protein, 12 aa, Severe acute respiratory syndrome coronavirus 2
  REGION 1..12: note = Table B: HLA-DRB1*01:02L HLA-DQA1*05:05-B1*03:01L
THGLNLEEAARY

SEQ ID NO: 19355 - protein, 12 aa, Severe acute respiratory syndrome coronavirus 2
  REGION 1..12: note = Table B: HLA-DRB1*01:02L
HGLNLEEAARYM

SEQ ID NO: 19356 - protein, 12 aa, Severe acute respiratory syndrome coronavirus 2
  REGION 1..12: note = Table B: HLA-DRB1*01:02L
GLNLEEAARYMR

SEQ ID NO: 19357 - protein, 14 aa, Severe acute respiratory syndrome coronavirus 2
  REGION 1..14: note = Table B: HLA-DRB1*01:02L HLA-DRB3*01:01L
LNLEEAARYMRSLK

SEQ ID NO: 19358 - protein, 14 aa, Severe acute respiratory syndrome coronavirus 2
  REGION 1..14: note = Table B: HLA-DRB1*01:02L HLA-DRB1*12:01L
PDAVTAYNGYLTSS

SEQ ID NO: 19359 - protein, 13 aa, Severe acute respiratory syndrome coronavirus 2
  REGION 1..13: note = Table B: HLA-DRB1*01:02L HLA-DRB1*14:17L
AVTAYNGYLTSSS

SEQ ID NO: 19360 - protein, 14 aa, Severe acute respiratory syndrome coronavirus 2
  REGION 1..14: note = Table B: HLA-DRB1*01:02L HLA-DPA1*03:01-B1*105:01L
SLAGSYKDWSYSGQ

SEQ ID NO: 19361 - protein, 14 aa, Severe acute respiratory syndrome coronavirus 2
  REGION 1..14: note = Table B: HLA-DRB1*01:02L HLA-DQA1*01:03-B1*06:01L
LAGSYKDWSYSGQS

SEQ ID NO: 19362 - protein, 14 aa, Severe acute respiratory syndrome coronavirus 2
  REGION 1..14: note = Table B: HLA-DRB1*01:02L HLA-DRB1*08:01L HLA-DPA1*01:03-B1*04:02L
AGSYKDWSYSGQST

SEQ ID NO: 19363 - protein, 14 aa, Severe acute respiratory syndrome coronavirus 2
  REGION 1..14: note = Table B: HLA-DRB1*01:02L
SGQSTQLGIEFLKR

SEQ ID NO: 19364 - protein, 14 aa, Severe acute respiratory syndrome coronavirus 2
  REGION 1..14: note = Table B: HLA-DRB1*01:02L
GQSTQLGIEFLKRG

SEQ ID NO: 19365 - protein, 13 aa, Severe acute respiratory syndrome coronavirus 2
  REGION 1..13: note = Table B: HLA-DRB1*01:02L HLA-DRB1*14:01L HLA-DRB1*12:01L HLA-DRB1*04:08L HLA-DRB1*15:03L
GIEFLKRGDKSVY

SEQ ID NO: 19366 - protein, 14 aa, Severe acute respiratory syndrome coronavirus 2
  REGION 1..14: note = Table B: HLA-DRB1*01:02L HLA-DRB1*14:01L HLA-DRB1*15:03L
IEFLKRGDKSVYYT

SEQ ID NO: 19367 - protein, 16 aa, Severe acute respiratory syndrome coronavirus 2
  REGION 1..16: note = Table B: HLA-DRB1*01:02L
EFLKRGDKSVYYTSNP

SEQ ID NO: 19368 - protein, 16 aa, Severe acute respiratory syndrome coronavirus 2
  REGION 1..16: note = Table B: HLA-DRB1*01:02L HLA-DPA1*02:01-B1*13:01L
FLKRGDKSVYYTSNPT

SEQ ID NO: 19369 - protein, 12 aa, Severe acute respiratory syndrome coronavirus 2
  REGION 1..12: note = Table B: HLA-DRB1*01:02L HLA-DRB1*15:03L
LSLREVRTIKVF

SEQ ID NO: 19370 - protein, 12 aa, Severe acute respiratory syndrome coronavirus 2
  REGION 1..12: note = Table B: HLA-DRB1*01:02L HLA-DRB1*15:03L
SLREVRTIKVFT

SEQ ID NO: 19371 - protein, 15 aa, Severe acute respiratory syndrome coronavirus 2
  REGION 1..15: note = Table B: HLA-DRB1*01:02L
TQVVDMSMTYGQQFG

SEQ ID NO: 19372 - protein, 14 aa, Severe acute respiratory syndrome coronavirus 2
  REGION 1..14: note = Table B: HLA-DRB1*01:02L
MTYGQQFGPTYLDG

SEQ ID NO: 19373 - protein, 12 aa, Severe acute respiratory syndrome coronavirus 2
  REGION 1..12: note = Table B: HLA-DRB1*01:02L HLA-DRB1*12:01L HLA-DRB1*16:01L HLA-DRB1*04:08L HLA-DRB1*15:03L
IKPHNSHEGKTF

SEQ ID NO: 19374 - protein, 14 aa, Severe acute respiratory syndrome coronavirus 2
  REGION 1..14: note = Table B: HLA-DRB1*01:02L
VLPNDDTLRVEAFE

SEQ ID NO: 19375 - protein, 12 aa, Severe acute respiratory syndrome coronavirus 2
  REGION 1..12: note = Table B: HLA-DRB1*01:02L HLA-DRB1*08:04L HLA-DRB3*02:01L HLA-DRB1*14:01L HLA-DRB1*08:01L HLA-DQA1*05:05-B1*03:01L HLA-DRB1*04:08L
DDTLRVEAFEYY

SEQ ID NO: 19376 - protein, 12 aa, Severe acute respiratory syndrome coronavirus 2
  REGION 1..12: note = Table B: HLA-DRB1*01:02L HLA-DRB1*14:01L HLA-DRB1*11:04L HLA-DRB1*08:01L HLA-DRB1*11:01L HLA-DRB3*01:01L HLA-DPA1*01:03-B1*02:01L
DTLRVEAFEYYH

SEQ ID NO: 19377 - protein, 13 aa, Severe acute respiratory syndrome coronavirus 2
  REGION 1..13: note = Table B: HLA-DRB1*01:02L HLA-DRB1*08:01L HLA-DRB1*12:01L HLA-DPA1*01:03-B1*02:01L
TLRVEAFEYYHTT

SEQ ID NO: 19378 - protein, 12 aa, Severe acute respiratory syndrome coronavirus 2
  REGION 1..12: note = Table B: HLA-DRB1*01:02L HLA-DQA1*01:01-B1*05:01L HLA-DRB1*07:01L
YHTTDPSFLGRY

SEQ ID NO: 19379 - protein, 12 aa, Severe acute respiratory syndrome coronavirus 2
  REGION 1..12: note = Table B: HLA-DRB1*01:02L
HTTDPSFLGRYM

SEQ ID NO: 19380 - protein, 11 aa, Severe acute respiratory syndrome coronavirus 2
  REGION 1..11: note = Table B: HLA-DRB1*01:02L HLA-DRB1*04:08L
RYMSALNHTKK

SEQ ID NO: 19381 - protein, 12 aa, Severe acute respiratory syndrome coronavirus 2
  REGION 1..12: note = Table B: HLA-DRB1*01:02L
YMSALNHTKKWK

SEQ ID NO: 19382 - protein, 12 aa, Severe acute respiratory syndrome coronavirus 2
  REGION 1..12: note = Table B: HLA-DRB1*01:02L HLA-DRB1*14:01L HLA-DRB1*12:01L HLA-DRB3*01:01L HLA-DRB1*16:01L
ALNHTKKWKYPQ

SEQ ID NO: 19383 - protein, 13 aa, Severe acute respiratory syndrome coronavirus 2
  REGION 1..13: note = Table B: HLA-DRB1*01:02L HLA-DRB1*12:01L HLA-DPA1*03:01-B1*105:01L HLA-DPA1*01:02-B1*04:01L HLA-DRB1*04:08L
TKKWKYPQVNGLT

SEQ ID NO: 19384 - protein, 15 aa, Severe acute respiratory syndrome coronavirus 2
  REGION 1..15: note = Table B: HLA-DRB1*01:02L
KKWKYPQVNGLTSIK

SEQ ID NO: 19385 - protein, 13 aa, Severe acute respiratory syndrome coronavirus 2
  REGION 1..13: note = Table B: HLA-DRB1*01:02L HLA-DPA1*02:01-B1*13:01L
LTSIKWADNNCYL

SEQ ID NO: 19386 - protein, 14 aa, Severe acute respiratory syndrome coronavirus 2
  REGION 1..14: note = Table B: HLA-DRB1*01:02L HLA-DPA1*03:01-B1*105:01L HLA-DRB1*15:03L
SIKWADNNCYLATA

SEQ ID NO: 19387 - protein, 15 aa, Severe acute respiratory syndrome coronavirus 2
  REGION 1..15: note = Table B: HLA-DRB1*01:02L HLA-DPA1*01:03-B1*03:01L HLA-DQA1*05:05-B1*03:19L HLA-DPA1*01:03-B1*04:01L HLA-DRB1*12:01L HLA-DPA1*01:03-B1*02:01L HLA-DQA1*05:05-B1*03:01L HLA-DRB1*16:01L HLA-DRB1*04:08L
  REGION 1..15: note = CONT. FROM ABOVE: HLA-DQA1*02:01-B1*03:03L HLA-DRB1*15:03L
DNNCYLATALLTLQQ

SEQ ID NO: 19388 - protein, 14 aa, Severe acute respiratory syndrome coronavirus 2
  REGION 1..14: note = Table B: HLA-DRB1*01:02L HLA-DRB1*12:01L HLA-DPA1*03:01-B1*105:01L HLA-DRB1*15:03L
LLTLQQIELKFNPP

SEQ ID NO: 19389 - protein, 14 aa, Severe acute respiratory syndrome coronavirus 2
  REGION 1..14: note = Table B: HLA-DRB1*01:02L HLA-DPA1*03:01-B1*105:01L HLA-DRB1*15:03L
LTLQQIELKFNPPA

SEQ ID NO: 19390 - protein, 12 aa, Severe acute respiratory syndrome coronavirus 2
  REGION 1..12: note = Table B: HLA-DRB1*01:02L HLA-DRB3*02:01L HLA-DRB1*04:08L
LKFNPPALQDAY

SEQ ID NO: 19391 - protein, 12 aa, Severe acute respiratory syndrome coronavirus 2
  REGION 1..12: note = Table B: HLA-DRB1*01:02L HLA-DPA1*01:03-B1*03:01L
YRARAGEAANFC

SEQ ID NO: 19392 - protein, 12 aa, Severe acute respiratory syndrome coronavirus 2
  REGION 1..12: note = Table B: HLA-DRB1*01:02L HLA-DPA1*03:01-B1*105:01L
LILAYCNKTVGE

SEQ ID NO: 19393 - protein, 12 aa, Severe acute respiratory syndrome coronavirus 2
  REGION 1..12: note = Table B: HLA-DRB1*01:02L HLA-DRB1*14:01L HLA-DQA1*05:01-B1*02:01L HLA-DRB1*12:01L HLA-DRB1*16:01L HLA-DRB1*15:03L
GDVRETMSYLFQ

SEQ ID NO: 19394 - protein, 12 aa, Severe acute respiratory syndrome coronavirus 2
  REGION 1..12: note = Table B: HLA-DRB1*01:02L HLA-DRB1*12:01L HLA-DRB1*15:03L
DVRETMSYLFQH

SEQ ID NO: 19395 - protein, 13 aa, Severe acute respiratory syndrome coronavirus 2
  REGION 1..13: note = Table B: HLA-DRB1*01:02L HLA-DPA1*03:01-B1*04:02L HLA-DRB1*08:01L HLA-DRB1*12:01L HLA-DPA1*02:01-B1*13:01L HLA-DRB1*16:01L HLA-DRB1*15:03L
VRETMSYLFQHAN

SEQ ID NO: 19396 - protein, 13 aa, Severe acute respiratory syndrome coronavirus 2
  REGION 1..13: note = Table B: HLA-DRB1*01:02L HLA-DRB1*12:01L HLA-DPA1*01:03-B1*02:01L HLA-DRB1*15:03L
SYLFQHANLDSCK

SEQ ID NO: 19397 - protein, 14 aa, Severe acute respiratory syndrome coronavirus 2
  REGION 1..14: note = Table B: HLA-DRB1*01:02L
GQQQTTLKGVEAVM

SEQ ID NO: 19398 - protein, 13 aa, Severe acute respiratory syndrome coronavirus 2
  REGION 1..13: note = Table B: HLA-DRB1*01:02L
TTLKGVEAVMYMG

SEQ ID NO: 19399 - protein, 14 aa, Severe acute respiratory syndrome coronavirus 2
  REGION 1..14: note = Table B: HLA-DRB1*01:02L
TLKGVEAVMYMGTL

SEQ ID NO: 19400 - protein, 14 aa, Severe acute respiratory syndrome coronavirus 2
  REGION 1..14: note = Table B: HLA-DRB1*01:02L
FKKGVQIPCTCGKQ

SEQ ID NO: 19401 - protein, 14 aa, Severe acute respiratory syndrome coronavirus 2
  REGION 1..14: note = Table B: HLA-DRB1*01:02L HLA-DQA1*02:01-B1*03:03L
GVQIPCTCGKQATK

SEQ ID NO: 19402 - protein, 14 aa, Severe acute respiratory syndrome coronavirus 2
  REGION 1..14: note = Table B: HLA-DRB1*01:02L
KHGTFTCASEYTGN

SEQ ID NO: 19403 - protein, 14 aa, Severe acute respiratory syndrome coronavirus 2
  REGION 1..14: note = Table B: HLA-DRB1*01:02L HLA-DRB1*04:08L
YKHITSKETLYCID

SEQ ID NO: 19404 - protein, 11 aa, Severe acute respiratory syndrome coronavirus 2
  REGION 1..11: note = Table B: HLA-DRB1*01:02L
LYCIDGALLTK

SEQ ID NO: 19405 - protein, 12 aa, Severe acute respiratory syndrome coronavirus 2
  REGION 1..12: note = Table B: HLA-DRB1*01:02L HLA-DPA1*01:03-B1*03:01L HLA-DPA1*03:01-B1*04:02L HLA-DRB1*08:01L HLA-DRB1*12:01L HLA-DPA1*01:03-B1*104:01L HLA-DPA1*01:02-B1*04:01L HLA-DRB1*16:01L HLA-DRB1*15:03L
IDGALLTKSSEY

SEQ ID NO: 19406 - protein, 14 aa, Severe acute respiratory syndrome coronavirus 2
  REGION 1..14: note = Table B: HLA-DRB1*01:02L HLA-DPA1*03:01-B1*105:01L HLA-DRB1*15:03L
ALLTKSSEYKGPIT

SEQ ID NO: 19407 - protein, 14 aa, Severe acute respiratory syndrome coronavirus 2
  REGION 1..14: note = Table B: HLA-DRB1*01:02L HLA-DPA1*02:01-B1*13:01L
LLTKSSEYKGPITD

SEQ ID NO: 19408 - protein, 14 aa, Severe acute respiratory syndrome coronavirus 2
  REGION 1..14: note = Table B: HLA-DRB1*01:02L
TEIDPKLDNYYKKD

SEQ ID NO: 19409 - protein, 15 aa, Severe acute respiratory syndrome coronavirus 2
  REGION 1..15: note = Table B: HLA-DRB1*01:02L HLA-DQA1*01-B1*05L HLA-DRB1*04:08L
DPKLDNYYKKDNSYF

SEQ ID NO: 19410 - protein, 14 aa, Severe acute respiratory syndrome coronavirus 2
  REGION 1..14: note = Table B: HLA-DRB1*01:02L HLA-DRB1*14:01L HLA-DPA1*03:01-B1*105:01L HLA-DRB1*04:08L
NYYKKDNSYFTEQP

SEQ ID NO: 19411 - protein, 11 aa, Severe acute respiratory syndrome coronavirus 2
  REGION 1..11: note = Table B: HLA-DRB1*01:02L HLA-DRB1*14:02L HLA-DRB1*15:03L
DLVPNQPYPNA

SEQ ID NO: 19412 - protein, 12 aa, Severe acute respiratory syndrome coronavirus 2
  REGION 1..12: note = Table B: HLA-DRB1*01:02L HLA-DRB1*15:03L
DNFKFVCDNIKF

SEQ ID NO: 19413 - protein, 11 aa, Severe acute respiratory syndrome coronavirus 2
  REGION 1..11: note = Table B: HLA-DRB1*01:02L HLA-DRB1*04:08L
GYKKPASRELK

SEQ ID NO: 19414 - protein, 15 aa, Severe acute respiratory syndrome coronavirus 2
  REGION 1..15: note = Table B: HLA-DRB1*01:02L HLA-DPA1*02:01-B1*13:01L
KPASRELKVTFFPDL

SEQ ID NO: 19415 - protein, 14 aa, Severe acute respiratory syndrome coronavirus 2
  REGION 1..14: note = Table B: HLA-DRB1*01:02L
LNGDVVAIDYKHYT

SEQ ID NO: 19416 - protein, 14 aa, Severe acute respiratory syndrome coronavirus 2
  REGION 1..14: note = Table B: HLA-DRB1*01:02L HLA-DRB1*11:04L
PSFKKGAKLLHKPI

SEQ ID NO: 19417 - protein, 14 aa, Severe acute respiratory syndrome coronavirus 2
  REGION 1..14: note = Table B: HLA-DRB1*01:02L HLA-DRB1*08:01L
IRCLWSTKPVETSN

SEQ ID NO: 19418 - protein, 13 aa, Severe acute respiratory syndrome coronavirus 2
  REGION 1..13: note = Table B: HLA-DRB1*01:02L HLA-DQA1*01:01-B1*05:01L HLA-DRB1*04:10L HLA-DRB1*12:01L HLA-DPA1*01:03-B1*104:01L
WSTKPVETSNSFD

SEQ ID NO: 19419 - protein, 14 aa, Severe acute respiratory syndrome coronavirus 2
  REGION 1..14: note = Table B: HLA-DRB1*01:02L
STKPVETSNSFDVL

SEQ ID NO: 19420 - protein, 15 aa, Severe acute respiratory syndrome coronavirus 2
  REGION 1..15: note = Table B: HLA-DRB1*01:02L HLA-DPA1*02:01-B1*13:01L
KPVSEEVVENPTIQK

SEQ ID NO: 19421 - protein, 14 aa, Severe acute respiratory syndrome coronavirus 2
  REGION 1..14: note = Table B: HLA-DRB1*01:02L HLA-DPA1*03:01-B1*105:01L HLA-DQA1*02:01-B1*03:03L HLA-DRB1*15:03L
IQKDVLECNVKTTE

SEQ ID NO: 19422 - protein, 13 aa, Severe acute respiratory syndrome coronavirus 2
  REGION 1..13: note = Table B: HLA-DRB1*01:02L HLA-DRB1*08:04L HLA-DPA1*01:03-B1*03:01L HLA-DRB1*12:02L HLA-DRB1*15:03L
VVGDIILKPANNS

SEQ ID NO: 19423 - protein, 15 aa, Severe acute respiratory syndrome coronavirus 2
  REGION 1..15: note = Table B: HLA-DRB1*01:02L
KPANNSLKITEEVGH

SEQ ID NO: 19424 - protein, 12 aa, Severe acute respiratory syndrome coronavirus 2
  REGION 1..12: note = Table B: HLA-DRB1*01:02L
KITEEVGHTDLM

SEQ ID NO: 19425 - protein, 16 aa, Severe acute respiratory syndrome coronavirus 2
  REGION 1..16: note = Table B: HLA-DRB1*01:02L HLA-DRB1*04:08L
ITEEVGHTDLMAAYVD

SEQ ID NO: 19426 - protein, 12 aa, Severe acute respiratory syndrome coronavirus 2
  REGION 1..12: note = Table B: HLA-DRB1*01:02L
SLTIKKPNELSR

SEQ ID NO: 19427 - protein, 14 aa, Severe acute respiratory syndrome coronavirus 2
  REGION 1..14: note = Table B: HLA-DRB1*01:02L HLA-DRB1*08:01L
IKKPNELSRVLGLK

SEQ ID NO: 19428 - protein, 13 aa, Severe acute respiratory syndrome coronavirus 2
  REGION 1..13: note = Table B: HLA-DRB1*01:02L
KPNELSRVLGLKT

SEQ ID NO: 19429 - protein, 11 aa, Severe acute respiratory syndrome coronavirus 2
  REGION 1..11: note = Table B: HLA-DRB1*01:02L HLA-DQA1*05:05-B1*03:19L HLA-DPA1*01:02-B1*04:01L HLA-DRB1*04:08L
IANYAKPFLNK

SEQ ID NO: 19430 - protein, 14 aa, Severe acute respiratory syndrome coronavirus 2
  REGION 1..14: note = Table B: HLA-DRB1*01:02L
NYAKPFLNKVVSTT

SEQ ID NO: 19431 - protein, 13 aa, Severe acute respiratory syndrome coronavirus 2
  REGION 1..13: note = Table B: HLA-DRB1*01:02L
NIVTRCLNRVCTN

SEQ ID NO: 19432 - protein, 14 aa, Severe acute respiratory syndrome coronavirus 2
  REGION 1..14: note = Table B: HLA-DRB1*01:02L
TLLLQLCTFTRSTN

SEQ ID NO: 19433 - protein, 16 aa, Severe acute respiratory syndrome coronavirus 2
  REGION 1..16: note = Table B: HLA-DRB1*01:02L HLA-DPA1*03:01-B1*04:02L HLA-DPA1*01:03-B1*04:02L HLA-DRB1*12:01L HLA-DRB1*16:01L HLA-DRB1*15:03L
GKFCLEASFNYLKSPN

SEQ ID NO: 19434 - protein, 11 aa, Severe acute respiratory syndrome coronavirus 2
  REGION 1..11: note = Table B: HLA-DRB1*01:02L HLA-DRB3*02:01L HLA-DPA1*01:03-B1*03:01L HLA-DRB1*14:01L HLA-DQA1*01-B1*05L HLA-DRB1*09:01L HLA-DRB1*07:01L
LIYSTAALGVL

SEQ ID NO: 19435 - protein, 13 aa, Severe acute respiratory syndrome coronavirus 2
  REGION 1..13: note = Table B: HLA-DRB1*01:02L HLA-DPA1*01:03-B1*03:01L HLA-DPA1*01:03-B1*04:02L HLA-DRB1*16:01L HLA-DRB1*04:08L
GYREGYLNSTNVT

SEQ ID NO: 19436 - protein, 12 aa, Severe acute respiratory syndrome coronavirus 2
  REGION 1..12: note = Table B: HLA-DRB1*01:02L HLA-DRB3*02:01L HLA-DQA1*03:01-B1*03:02L
YLNSTNVTIATY

SEQ ID NO: 19437 - protein, 14 aa, Severe acute respiratory syndrome coronavirus 2
  REGION 1..14: note = Table B: HLA-DRB1*01:02L HLA-DQA1*01-B1*05L HLA-DRB1*12:01L HLA-DRB1*16:01L
AAIMQLFFSYFAVH

SEQ ID NO: 19438 - protein, 12 aa, Severe acute respiratory syndrome coronavirus 2
  REGION 1..12: note = Table B: HLA-DRB1*01:02L HLA-DRB1*15:03L
VQMAPISAMVRM

SEQ ID NO: 19439 - protein, 15 aa, Severe acute respiratory syndrome coronavirus 2
  REGION 1..15: note = Table B: HLA-DRB1*01:02L HLA-DRB1*16:01L
VRMYIFFASFYYVWK

SEQ ID NO: 19440 - protein, 13 aa, Severe acute respiratory syndrome coronavirus 2
  REGION 1..13: note = Table B: HLA-DRB1*01:02L HLA-DPA1*01:03-B1*03:01L HLA-DRB1*12:01L
SFYYVWKSYVHVV

SEQ ID NO: 19441 - protein, 14 aa, Severe acute respiratory syndrome coronavirus 2
  REGION 1..14: note = Table B: HLA-DRB1*01:02L
WKSYVHVVDGCNSS

SEQ ID NO: 19442 - protein, 13 aa, Severe acute respiratory syndrome coronavirus 2
  REGION 1..13: note = Table B: HLA-DRB1*01:02L HLA-DQA1*05:05-B1*03:19L HLA-DPA1*03:01-B1*105:01L HLA-DQA1*05:05-B1*03:01L HLA-DQA1*01:03-B1*06:01L
VHVVDGCNSSTCM

SEQ ID NO: 19443 - protein, 12 aa, Severe acute respiratory syndrome coronavirus 2
  REGION 1..12: note = Table B: HLA-DRB1*01:02L
RVECTTIVNGVR

SEQ ID NO: 19444 - protein, 12 aa, Severe acute respiratory syndrome coronavirus 2
  REGION 1..12: note = Table B: HLA-DRB1*01:02L HLA-DRB1*04:08L
VECTTIVNGVRR

SEQ ID NO: 19445 - protein, 14 aa, Severe acute respiratory syndrome coronavirus 2
  REGION 1..14: note = Table B: HLA-DRB1*01:02L HLA-DQA1*01:03-B1*06:01L
ANGGKGFCKLHNWN

SEQ ID NO: 19446 - protein, 14 aa, Severe acute respiratory syndrome coronavirus 2
  REGION 1..14: note = Table B: HLA-DRB1*01:02L HLA-DRB1*04:08L
VTVKNGSIHLYFDK

SEQ ID NO: 19447 - protein, 12 aa, Severe acute respiratory syndrome coronavirus 2
  REGION 1..12: note = Table B: HLA-DRB1*01:02L HLA-DRB1*08:01L HLA-DRB1*04:08L
YFDKAGQKTYER

SEQ ID NO: 19448 - protein, 14 aa, Severe acute respiratory syndrome coronavirus 2
  REGION 1..14: note = Table B: HLA-DRB1*01:02L HLA-DRB1*08:01L
DKAGQKTYERHSLS

SEQ ID NO: 19449 - protein, 13 aa, Severe acute respiratory syndrome coronavirus 2
  REGION 1..13: note = Table B: HLA-DRB1*01:02L
GQKTYERHSLSHF

SEQ ID NO: 19450 - protein, 12 aa, Severe acute respiratory syndrome coronavirus 2
  REGION 1..12: note = Table B: HLA-DRB1*01:02L HLA-DRB1*08:01L HLA-DRB1*12:01L HLA-DRB1*15:03L
TYERHSLSHFVN

SEQ ID NO: 19451 - protein, 13 aa, Severe acute respiratory syndrome coronavirus 2
  REGION 1..13: note = Table B: HLA-DRB1*01:02L HLA-DRB1*16:01L HLA-DRB1*15:03L
HSLSHFVNLDNLR

SEQ ID NO: 19452 - protein, 15 aa, Severe acute respiratory syndrome coronavirus 2
  REGION 1..15: note = Table B: HLA-DRB1*01:02L
TKGSLPINVIVFDGK

SEQ ID NO: 19453 - protein, 14 aa, Severe acute respiratory syndrome coronavirus 2
  REGION 1..14: note = Table B: HLA-DRB1*01:02L HLA-DPA1*02:01-B1*13:01L HLA-DQA1*03:01-B1*03:02L HLA-DQA1*02:01-B1*03:03L
DGKSKCEESSAKSA

SEQ ID NO: 19454 - protein, 14 aa, Severe acute respiratory syndrome coronavirus 2
  REGION 1..14: note = Table B: HLA-DRB1*01:02L
EESSAKSASVYYSQ

SEQ ID NO: 19455 - protein, 13 aa, Severe acute respiratory syndrome coronavirus 2
  REGION 1..13: note = Table B: HLA-DRB1*01:02L
SSAKSASVYYSQL

SEQ ID NO: 19456 - protein, 14 aa, Severe acute respiratory syndrome coronavirus 2
  REGION 1..14: note = Table B: HLA-DRB1*01:02L HLA-DPA1*01:03-B1*03:01L HLA-DPA1*01:03-B1*04:02L HLA-DRB1*12:01L HLA-DPA1*01:03-B1*02:01L HLA-DQA1*05:05-B1*03:01L HLA-DRB1*15:03L
YSQLMCQPILLLDQ

SEQ ID NO: 19457 - protein, 13 aa, Severe acute respiratory syndrome coronavirus 2
  REGION 1..13: note = Table B: HLA-DRB1*01:02L HLA-DRB3*02:01L
DSAEVAVKMFDAY

SEQ ID NO: 19458 - protein, 12 aa, Severe acute respiratory syndrome coronavirus 2
  REGION 1..12: note = Table B: HLA-DRB1*01:02L HLA-DPA1*01:03-B1*03:01L
ATAEAELAKNVS

SEQ ID NO: 19459 - protein, 13 aa, Severe acute respiratory syndrome coronavirus 2
  REGION 1..13: note = Table B: HLA-DRB1*01:02L HLA-DPA1*02:01-B1*13:01L HLA-DRB1*07:01L HLA-DRB1*04:08L HLA-DRB1*08:03L
AEAELAKNVSLDN

SEQ ID NO: 19460 - protein, 12 aa, Severe acute respiratory syndrome coronavirus 2
  REGION 1..12: note = Table B: HLA-DRB1*01:02L HLA-DPA1*01:03-B1*03:01L HLA-DQA1*01:01-B1*05:01L HLA-DRB1*12:01L HLA-DRB1*16:01L HLA-DRB1*04:08L
ISAARQGFVDSD

SEQ ID NO: 19461 - protein, 13 aa, Severe acute respiratory syndrome coronavirus 2
  REGION 1..13: note = Table B: HLA-DRB1*01:02L HLA-DPA1*02:01-B1*13:01L
RQGFVDSDVETKD

SEQ ID NO: 19462 - protein, 14 aa, Severe acute respiratory syndrome coronavirus 2
  REGION 1..14: note = Table B: HLA-DRB1*01:02L HLA-DRB1*08:04L HLA-DRB1*04:08L
QGFVDSDVETKDVV

SEQ ID NO: 19463 - protein, 14 aa, Severe acute respiratory syndrome coronavirus 2
  REGION 1..14: note = Table B: HLA-DRB1*01:02L HLA-DRB1*08:01L HLA-DPA1*03:01-B1*105:01L HLA-DQA1*02:01-B1*03:03L HLA-DRB1*15:03L
VVECLKLSHQSDIE

SEQ ID NO: 19464 - protein, 14 aa, Severe acute respiratory syndrome coronavirus 2
  REGION 1..14: note = Table B: HLA-DRB1*01:02L HLA-DPA1*01:03-B1*03:01L HLA-DRB1*12:01L HLA-DRB1*04:08L HLA-DRB1*15:03L
KLSHQSDIEVTGDS

SEQ ID NO: 19465 - protein, 14 aa, Severe acute respiratory syndrome coronavirus 2
  REGION 1..14: note = Table B: HLA-DRB1*01:02L HLA-DPA1*02:01-B1*13:01L
SDIEVTGDSCNNYM

SEQ ID NO: 19466 - protein, 14 aa, Severe acute respiratory syndrome coronavirus 2
  REGION 1..14: note = Table B: HLA-DRB1*01:02L
DLGACIDCSARHIN

SEQ ID NO: 19467 - protein, 12 aa, Severe acute respiratory syndrome coronavirus 2
  REGION 1..12: note = Table B: HLA-DRB1*01:02L
ARHINAQVAKSH

SEQ ID NO: 19468 - protein, 13 aa, Severe acute respiratory syndrome coronavirus 2
  REGION 1..13: note = Table B: HLA-DRB1*01:02L HLA-DRB1*08:04L
NIALIWNVKDFMS

SEQ ID NO: 19469 - protein, 13 aa, Severe acute respiratory syndrome coronavirus 2
  REGION 1..13: note = Table B: HLA-DRB1*01:02L HLA-DRB1*08:04L
IALIWNVKDFMSL

SEQ ID NO: 19470 - protein, 12 aa, Severe acute respiratory syndrome coronavirus 2
  REGION 1..12: note = Table B: HLA-DRB1*01:02L HLA-DRB1*08:01L HLA-DPA1*01:03-B1*02:01L
IWNVKDFMSLSE

SEQ ID NO: 19471 - protein, 11 aa, Severe acute respiratory syndrome coronavirus 2
  REGION 1..11: note = Table B: HLA-DRB1*01:02L HLA-DRB1*16:01L HLA-DRB1*15:03L
FMSLSEQLRKQ

SEQ ID NO: 19472 - protein, 12 aa, Severe acute respiratory syndrome coronavirus 2
  REGION 1..12: note = Table B: HLA-DRB1*01:02L HLA-DRB1*11:04L HLA-DRB1*08:01L HLA-DRB1*11:01L HLA-DRB1*16:01L
QLRKQIRSAAKK

SEQ ID NO: 19473 - protein, 12 aa, Severe acute respiratory syndrome coronavirus 2
  REGION 1..12: note = Table B: HLA-DRB1*01:02L
LRKQIRSAAKKN

SEQ ID NO: 19474 - protein, 14 aa, Severe acute respiratory syndrome coronavirus 2
  REGION 1..14: note = Table B: HLA-DRB1*01:02L
KNNLPFKLTCATTR

SEQ ID NO: 19475 - protein, 12 aa, Severe acute respiratory syndrome coronavirus 2
  REGION 1..12: note = Table B: HLA-DRB1*01:02L HLA-DRB1*04:08L
KLTCATTRQVVN

SEQ ID NO: 19476 - protein, 12 aa, Severe acute respiratory syndrome coronavirus 2
  REGION 1..12: note = Table B: HLA-DRB1*01:02L HLA-DRB1*04:08L
HTDFSSEIIGYK

SEQ ID NO: 19477 - protein, 14 aa, Severe acute respiratory syndrome coronavirus 2
  REGION 1..14: note = Table B: HLA-DRB1*01:02L HLA-DRB1*08:04L HLA-DRB1*14:02L HLA-DPA1*01:03-B1*104:01L HLA-DRB1*15:03L
IDGGVTRDIASTDT

SEQ ID NO: 19478 - protein, 14 aa, Severe acute respiratory syndrome coronavirus 2
  REGION 1..14: note = Table B: HLA-DRB1*01:02L HLA-DQA1*05:05-B1*03:01L
IASTDTCFANKHAD

SEQ ID NO: 19479 - protein, 15 aa, Severe acute respiratory syndrome coronavirus 2
  REGION 1..15: note = Table B: HLA-DRB1*01:02L HLA-DPA1*02:01-B1*13:01L HLA-DRB1*16:01L HLA-DRB1*15:03L
ANKHADFDTWFSQRG

SEQ ID NO: 19480 - protein, 14 aa, Severe acute respiratory syndrome coronavirus 2
  REGION 1..14: note = Table B: HLA-DRB1*01:02L
KHADFDTWFSQRGG

SEQ ID NO: 19481 - protein, 14 aa, Severe acute respiratory syndrome coronavirus 2
  REGION 1..14: note = Table B: HLA-DRB1*01:02L HLA-DRB1*04:08L
TWFSQRGGSYTNDK

SEQ ID NO: 19482 - protein, 14 aa, Severe acute respiratory syndrome coronavirus 2
  REGION 1..14: note = Table B: HLA-DRB1*01:02L HLA-DQA1*05:05-B1*03:19L
WFSQRGGSYTNDKA

SEQ ID NO: 19483 - protein, 14 aa, Severe acute respiratory syndrome coronavirus 2
  REGION 1..14: note = Table B: HLA-DRB1*01:02L
DKACPLIAAVITRE

SEQ ID NO: 19484 - protein, 13 aa, Severe acute respiratory syndrome coronavirus 2
  REGION 1..13: note = Table B: HLA-DRB1*01:02L
PGTILRTTNGDFL

SEQ ID NO: 19485 - protein, 14 aa, Severe acute respiratory syndrome coronavirus 2
  REGION 1..14: note = Table B: HLA-DRB1*01:02L
LRTTNGDFLHFLPR

SEQ ID NO: 19486 - protein, 14 aa, Severe acute respiratory syndrome coronavirus 2
  REGION 1..14: note = Table B: HLA-DRB1*01:02L HLA-DRB1*16:01L HLA-DRB1*15:03L
PRVFSAVGNICYTP

SEQ ID NO: 19487 - protein, 14 aa, Severe acute respiratory syndrome coronavirus 2
  REGION 1..14: note = Table B: HLA-DRB1*01:02L HLA-DRB1*04:08L HLA-DRB1*15:03L
RVFSAVGNICYTPS

SEQ ID NO: 19488 - protein, 12 aa, Severe acute respiratory syndrome coronavirus 2
  REGION 1..12: note = Table B: HLA-DRB1*01:02L
NICYTPSKLIEY

SEQ ID NO: 19489 - protein, 14 aa, Severe acute respiratory syndrome coronavirus 2
  REGION 1..14: note = Table B: HLA-DRB1*01:02L HLA-DPA1*01:03-B1*03:01L HLA-DQA1*05:01-B1*02:01L HLA-DPA1*01:03-B1*04:02L HLA-DQA1*03:01-B1*03:02L HLA-DRB1*04:08L HLA-DRB1*15:03L
YTDFATSACVLAAE

SEQ ID NO: 19490 - protein, 14 aa, Severe acute respiratory syndrome coronavirus 2
  REGION 1..14: note = Table B: HLA-DRB1*01:02L HLA-DRB1*16:01L HLA-DRB1*04:08L HLA-DRB1*15:03L
AAECTIFKDASGKP

SEQ ID NO: 19491 - protein, 13 aa, Severe acute respiratory syndrome coronavirus 2
  REGION 1..13: note = Table B: HLA-DRB1*01:02L HLA-DPA1*01:03-B1*03:01L HLA-DPA1*03:01-B1*04:02L
LEGSVAYESLRPD

SEQ ID NO: 19492 - protein, 12 aa, Severe acute respiratory syndrome coronavirus 2
  REGION 1..12: note = Table B: HLA-DRB1*01:02L
AYESLRPDTRYV

SEQ ID NO: 19493 - protein, 13 aa, Severe acute respiratory syndrome coronavirus 2
  REGION 1..13: note = Table B: HLA-DRB1*01:02L HLA-DPA1*02:01-B1*13:01L
IQFPNTYLEGSVR

SEQ ID NO: 19494 - protein, 12 aa, Severe acute respiratory syndrome coronavirus 2
  REGION 1..12: note = Table B: HLA-DRB1*01:02L
RVVTTFDSEYCR

SEQ ID NO: 19495 - protein, 14 aa, Severe acute respiratory syndrome coronavirus 2
  REGION 1..14: note = Table B: HLA-DRB1*01:02L HLA-DRB1*04:08L
DSEYCRHGTCERSE

SEQ ID NO: 19496 - protein, 15 aa, Severe acute respiratory syndrome coronavirus 2
  REGION 1..15: note = Table B: HLA-DRB1*01:02L HLA-DQA1*02:01-B1*03:03L
SEYCRHGTCERSEAG

SEQ ID NO: 19497 - protein, 12 aa, Severe acute respiratory syndrome coronavirus 2
  REGION 1..12: note = Table B: HLA-DRB1*01:02L HLA-DRB1*14:01L
GRWVLNNDYYRS

SEQ ID NO: 19498 - protein, 10 aa, Severe acute respiratory syndrome coronavirus 2
  REGION 1..10: note = Table B: HLA-DRB1*01:02L HLA-DRB1*16:01L
YRSLPGVFCG

SEQ ID NO: 19499 - protein, 14 aa, Severe acute respiratory syndrome coronavirus 2
  REGION 1..14: note = Table B: HLA-DRB1*01:02L HLA-DRB1*08:04L HLA-DRB1*11:01L HLA-DRB1*04:08L
YYFMRFRRAFGEYS

SEQ ID NO: 19500 - protein, 12 aa, Severe acute respiratory syndrome coronavirus 2
  REGION 1..12: note = Table B: HLA-DRB1*01:02L HLA-DRB1*08:01L HLA-DRB1*16:01L HLA-DRB1*04:08L
MRFRRAFGEYSH

SEQ ID NO: 19501 - protein, 12 aa, Severe acute respiratory syndrome coronavirus 2
  REGION 1..12: note = Table B: HLA-DRB1*01:02L
RFRRAFGEYSHV

SEQ ID NO: 19502 - protein, 11 aa, Severe acute respiratory syndrome coronavirus 2
  REGION 1..11: note = Table B: HLA-DRB1*01:02L HLA-DRB1*16:01L
SHVVAFNTLLF

SEQ ID NO: 19503 - protein, 14 aa, Severe acute respiratory syndrome coronavirus 2
  REGION 1..14: note = Table B: HLA-DRB1*01:02L HLA-DPA1*01:03-B1*04:02L HLA-DRB1*16:01L HLA-DRB1*04:08L
HIQWMVMFTPLVPF

SEQ ID NO: 19504 - protein, 10 aa, Severe acute respiratory syndrome coronavirus 2
  REGION 1..10: note = Table B: HLA-DRB1*01:02L HLA-DRB1*15:03L
FTPLVPFWIT

SEQ ID NO: 19505 - protein, 12 aa, Severe acute respiratory syndrome coronavirus 2
  REGION 1..12: note = Table B: HLA-DRB1*01:02L
TIAYIICISTKH

SEQ ID NO: 19506 - protein, 12 aa, Severe acute respiratory syndrome coronavirus 2
  REGION 1..12: note = Table B: HLA-DRB1*01:02L HLA-DPA1*03:01-B1*04:02L
AYIICISTKHFY

SEQ ID NO: 19507 - protein, 11 aa, Severe acute respiratory syndrome coronavirus 2
  REGION 1..11: note = Table B: HLA-DRB1*01:02L HLA-DRB1*04:08L
FYWFFSNYLKR

SEQ ID NO: 19508 - protein, 14 aa, Severe acute respiratory syndrome coronavirus 2
  REGION 1..14: note = Table B: HLA-DRB1*01:02L HLA-DRB1*12:01L HLA-DPA1*02:01-B1*13:01L
YLKRRVVFNGVSFS

SEQ ID NO: 19509 - protein, 14 aa, Severe acute respiratory syndrome coronavirus 2
  REGION 1..14: note = Table B: HLA-DRB1*01:02L HLA-DPA1*01:03-B1*03:01L HLA-DPA1*03:01-B1*04:02L HLA-DRB1*15:03L
FEEAALCTFLLNKE

SEQ ID NO: 19510 - protein, 14 aa, Severe acute respiratory syndrome coronavirus 2
  REGION 1..14: note = Table B: HLA-DRB1*01:02L
KEMYLKLRSDVLLP

SEQ ID NO: 19511 - protein, 14 aa, Severe acute respiratory syndrome coronavirus 2
  REGION 1..14: note = Table B: HLA-DRB1*01:02L
EMYLKLRSDVLLPL

SEQ ID NO: 19512 - protein, 12 aa, Severe acute respiratory syndrome coronavirus 2
  REGION 1..12: note = Table B: HLA-DRB1*01:02L
LLPLTQYNRYLA

SEQ ID NO: 19513 - protein, 12 aa, Severe acute respiratory syndrome coronavirus 2
  REGION 1..12: note = Table B: HLA-DRB1*01:02L HLA-DRB1*04:08L
TQYNRYLALYNK

SEQ ID NO: 19514 - protein, 12 aa, Severe acute respiratory syndrome coronavirus 2
  REGION 1..12: note = Table B: HLA-DRB1*01:02L HLA-DPA1*03:01-B1*04:02L HLA-DPA1*03:01-B1*105:01L HLA-DPA1*01:02-B1*04:01L HLA-DRB1*15:03L
QYNRYLALYNKY

SEQ ID NO: 19515 - protein, 11 aa, Severe acute respiratory syndrome coronavirus 2
  REGION 1..11: note = Table B: HLA-DRB1*01:02L HLA-DRB1*08:01L HLA-DRB1*12:01L HLA-DRB1*04:08L
NRYLALYNKYK

SEQ ID NO: 19516 - protein, 11 aa, Severe acute respiratory syndrome coronavirus 2
  REGION 1..11: note = Table B: HLA-DRB1*01:02L
YLALYNKYKYF

SEQ ID NO: 19517 - protein, 15 aa, Severe acute respiratory syndrome coronavirus 2
  REGION 1..15: note = Table B: HLA-DRB1*01:02L
YREAACCHLAKALND

SEQ ID NO: 19518 - protein, 16 aa, Severe acute respiratory syndrome coronavirus 2
  REGION 1..16: note = Table B: HLA-DRB1*01:02L
LNDFSNSGSDVLYQPP

SEQ ID NO: 19519 - protein, 15 aa, Severe acute respiratory syndrome coronavirus 2
  REGION 1..15: note = Table B: HLA-DRB1*01:02L HLA-DRB1*08:04L HLA-DRB1*11:04L HLA-DRB1*08:01L HLA-DRB1*11:01L HLA-DRB3*01:01L
SAVLQSGFRKMAFPS

SEQ ID NO: 19520 - protein, 15 aa, Severe acute respiratory syndrome coronavirus 2
  REGION 1..15: note = Table B: HLA-DRB1*01:02L
AVLQSGFRKMAFPSG

SEQ ID NO: 19521 - protein, 12 aa, Severe acute respiratory syndrome coronavirus 2
  REGION 1..12: note = Table B: HLA-DRB1*01:02L HLA-DRB1*12:01L HLA-DRB1*15:03L
LIRKSNHNFLVQ

SEQ ID NO: 19522 - protein, 13 aa, Severe acute respiratory syndrome coronavirus 2
  REGION 1..13: note = Table B: HLA-DRB1*01:02L HLA-DRB1*12:01L HLA-DRB1*15:03L
AGNVQLRVIGHSM

SEQ ID NO: 19523 - protein, 17 aa, Severe acute respiratory syndrome coronavirus 2
  REGION 1..17: note = Table B: HLA-DRB1*01:02L
IQPGQTFSVLACYNGSP

SEQ ID NO: 19524 - protein, 14 aa, Severe acute respiratory syndrome coronavirus 2
  REGION 1..14: note = Table B: HLA-DRB1*01:02L HLA-DRB1*15:03L
SVLACYNGSPSGVY

SEQ ID NO: 19525 - protein, 14 aa, Severe acute respiratory syndrome coronavirus 2
  REGION 1..14: note = Table B: HLA-DRB1*01:02L HLA-DPA1*01:03-B1*03:01L HLA-DRB1*15:03L
VLACYNGSPSGVYQ

SEQ ID NO: 19526 - protein, 13 aa, Severe acute respiratory syndrome coronavirus 2
  REGION 1..13: note = Table B: HLA-DRB1*01:02L HLA-DRB1*08:01L HLA-DRB1*11:01L HLA-DRB1*12:01L HLA-DQA1*01:03-B1*06:01L HLA-DQA1*02:01-B1*03:03L HLA-DRB1*15:03L
IDYDCVSFCYMHH

SEQ ID NO: 19527 - protein, 13 aa, Severe acute respiratory syndrome coronavirus 2
  REGION 1..13: note = Table B: HLA-DRB1*01:02L HLA-DRB1*14:01L HLA-DRB1*04:08L
GVHAGTDLEGNFY

SEQ ID NO: 19528 - protein, 13 aa, Severe acute respiratory syndrome coronavirus 2
  REGION 1..13: note = Table B: HLA-DRB1*01:02L HLA-DPA1*03:01-B1*04:02L HLA-DQA1*01:01-B1*05:01L
EGNFYGPFVDRQT

SEQ ID NO: 19529 - protein, 12 aa, Severe acute respiratory syndrome coronavirus 2
  REGION 1..12: note = Table B: HLA-DRB1*01:02L HLA-DRB1*04:10L HLA-DRB1*04:08L HLA-DRB1*15:03L
YGPFVDRQTAQA

SEQ ID NO: 19530 - protein, 13 aa, Severe acute respiratory syndrome coronavirus 2
  REGION 1..13: note = Table B: HLA-DRB1*01:02L
NVLAWLYAAVING

SEQ ID NO: 19531 - protein, 12 aa, Severe acute respiratory syndrome coronavirus 2
  REGION 1..12: note = Table B: HLA-DRB1*01:02L HLA-DPA1*01:03-B1*03:01L HLA-DRB1*08:01L HLA-DRB1*04:10L HLA-DRB1*12:01L HLA-DRB1*10:01L HLA-DRB1*15:03L
AWLYAAVINGDR

SEQ ID NO: 19532 - protein, 11 aa, Severe acute respiratory syndrome coronavirus 2
  REGION 1..11: note = Table B: HLA-DRB1*01:02L
LYAAVINGDRW

SEQ ID NO: 19533 - protein, 13 aa, Severe acute respiratory syndrome coronavirus 2
  REGION 1..13: note = Table B: HLA-DRB1*01:02L HLA-DRB1*08:04L HLA-DRB1*11:01L HLA-DPA1*01:03-B1*02:01L
DRWFLNRFTTTLN

SEQ ID NO: 19534 - protein, 14 aa, Severe acute respiratory syndrome coronavirus 2
  REGION 1..14: note = Table B: HLA-DRB1*01:02L HLA-DPA1*02:01-B1*13:01L
FNLVAMKYNYEPLT

SEQ ID NO: 19535 - protein, 13 aa, Severe acute respiratory syndrome coronavirus 2
  REGION 1..13: note = Table B: HLA-DRB1*01:02L
PLSAQTGIAVLDM

SEQ ID NO: 19536 - protein, 13 aa, Severe acute respiratory syndrome coronavirus 2
  REGION 1..13: note = Table B: HLA-DRB1*01:02L HLA-DRB1*12:01L HLA-DQA1*05:05-B1*03:01L HLA-DRB1*04:08L HLA-DQA1*02:01-B1*03:03L
TGIAVLDMCASLK

SEQ ID NO: 19537 - protein, 15 aa, Severe acute respiratory syndrome coronavirus 2
  REGION 1..15: note = Table B: HLA-DRB1*01:02L
KELLQNGMNGRTILG

SEQ ID NO: 19538 - protein, 14 aa, Severe acute respiratory syndrome coronavirus 2
  REGION 1..14: note = Table B: HLA-DRB1*01:02L HLA-DRB1*08:04L
ALLEDEFTPFDVVR

SEQ ID NO: 19539 - protein, 12 aa, Severe acute respiratory syndrome coronavirus 2
  REGION 1..12: note = Table B: HLA-DRB1*01:02L HLA-DRB1*14:17L HLA-DRB1*15:03L
SGVTFQSAVKRT

SEQ ID NO: 19540 - protein, 12 aa, Severe acute respiratory syndrome coronavirus 2
  REGION 1..12: note = Table B: HLA-DRB1*01:02L HLA-DRB1*14:01L HLA-DRB1*08:01L HLA-DRB1*16:01L HLA-DRB1*04:08L
SAVKRTIKGTHH

SEQ ID NO: 19541 - protein, 12 aa, Severe acute respiratory syndrome coronavirus 2
  REGION 1..12: note = Table B: HLA-DRB1*01:02L HLA-DRB1*16:01L
AVKRTIKGTHHW

SEQ ID NO: 19542 - protein, 14 aa, Severe acute respiratory syndrome coronavirus 2
  REGION 1..14: note = Table B: HLA-DRB1*01:02L
KRTIKGTHHWLLLT

SEQ ID NO: 19543 - protein, 14 aa, Severe acute respiratory syndrome coronavirus 2
  REGION 1..14: note = Table B: HLA-DRB1*01:02L HLA-DPA1*01:03-B1*03:01L HLA-DPA1*01:03-B1*04:02L HLA-DPA1*01:03-B1*104:01L
LPFAMGIIAMSAFA

SEQ ID NO: 19544 - protein, 11 aa, Severe acute respiratory syndrome coronavirus 2
  REGION 1..11: note = Table B: HLA-DRB1*01:02L HLA-DRB1*08:01L HLA-DRB1*04:08L
FAMMFVKHKHA

SEQ ID NO: 19545 - protein, 12 aa, Severe acute respiratory syndrome coronavirus 2
  REGION 1..12: note = Table B: HLA-DRB1*01:02L
LFLLPSLATVAY

SEQ ID NO: 19546 - protein, 17 aa, Severe acute respiratory syndrome coronavirus 2
  REGION 1..17: note = Table B: HLA-DRB1*01:02L
LPSLATVAYFNMVYMPA

SEQ ID NO: 19547 - protein, 14 aa, Severe acute respiratory syndrome coronavirus 2
  REGION 1..14: note = Table B: HLA-DRB1*01:02L HLA-DRB1*08:04L HLA-DPA1*01:03-B1*03:01L HLA-DRB1*12:01L HLA-DPA1*02:01-B1*13:01L HLA-DQA1*05:05-B1*03:01L HLA-DRB1*16:01L HLA-DRB1*04:08L
VAYFNMVYMPASWV

SEQ ID NO: 19548 - protein, 13 aa, Severe acute respiratory syndrome coronavirus 2
  REGION 1..13: note = Table B: HLA-DRB1*01:02L
DMVDTSLSGFKLK

SEQ ID NO: 19549 - protein, 14 aa, Severe acute respiratory syndrome coronavirus 2
  REGION 1..14: note = Table B: HLA-DRB1*01:02L HLA-DRB1*15:03L
SGFKLKDCVMYASA

SEQ ID NO: 19550 - protein, 13 aa, Severe acute respiratory syndrome coronavirus 2
  REGION 1..13: note = Table B: HLA-DRB1*01:02L HLA-DRB1*14:01L
VVLLILMTARTVY

SEQ ID NO: 19551 - protein, 13 aa, Severe acute respiratory syndrome coronavirus 2
  REGION 1..13: note = Table B: HLA-DRB1*01:02L
LMTARTVYDDGAR

SEQ ID NO: 19552 - protein, 13 aa, Severe acute respiratory syndrome coronavirus 2
  REGION 1..13: note = Table B: HLA-DRB1*01:02L HLA-DPA1*01:03-B1*03:01L HLA-DRB1*16:01L
ARRVWTLMNVLTL

SEQ ID NO: 19553 - protein, 12 aa, Severe acute respiratory syndrome coronavirus 2
  REGION 1..12: note = Table B: HLA-DRB1*01:02L
WTLMNVLTLVYK

SEQ ID NO: 19554 - protein, 13 aa, Severe acute respiratory syndrome coronavirus 2
  REGION 1..13: note = Table B: HLA-DRB1*01:02L HLA-DRB1*04:08L
NVLTLVYKVYYGN

SEQ ID NO: 19555 - protein, 13 aa, Severe acute respiratory syndrome coronavirus 2
  REGION 1..13: note = Table B: HLA-DRB1*01:02L HLA-DRB1*08:04L HLA-DPA1*01:03-B1*03:01L HLA-DRB1*08:01L HLA-DQA1*05:01-B1*02:01L HLA-DPA1*01:03-B1*04:02L HLA-DRB1*16:01L
VVTTVMFLARGIV

SEQ ID NO: 19556 - protein, 10 aa, Severe acute respiratory syndrome coronavirus 2
  REGION 1..10: note = Table B: HLA-DRB1*01:02L HLA-DRB1*12:01L HLA-DRB1*15:03L
IFFITGNTLQ

SEQ ID NO: 19557 - protein, 14 aa, Severe acute respiratory syndrome coronavirus 2
  REGION 1..14: note = Table B: HLA-DRB1*01:02L
FGLFCLLNRYFRLT

SEQ ID NO: 19558 - protein, 13 aa, Severe acute respiratory syndrome coronavirus 2
  REGION 1..13: note = Table B: HLA-DRB1*01:02L HLA-DRB1*04:08L
NRYFRLTLGVYDY

SEQ ID NO: 19559 - protein, 13 aa, Severe acute respiratory syndrome coronavirus 2
  REGION 1..13: note = Table B: HLA-DRB1*01:02L
LGVYDYLVSTQEF

SEQ ID NO: 19560 - protein, 12 aa, Severe acute respiratory syndrome coronavirus 2
  REGION 1..12: note = Table B: HLA-DRB1*01:02L HLA-DRB3*02:01L
YDYLVSTQEFRY

SEQ ID NO: 19561 - protein, 11 aa, Severe acute respiratory syndrome coronavirus 2
  REGION 1..11: note = Table B: HLA-DRB1*01:02L HLA-DRB3*02:01L
YLVSTQEFRYM

SEQ ID NO: 19562 - protein, 12 aa, Severe acute respiratory syndrome coronavirus 2
  REGION 1..12: note = Table B: HLA-DRB1*01:02L
QEFRYMNSQGLL

SEQ ID NO: 19563 - protein, 12 aa, Severe acute respiratory syndrome coronavirus 2
  REGION 1..12: note = Table B: HLA-DRB1*01:02L
EFRYMNSQGLLP

SEQ ID NO: 19564 - protein, 14 aa, Severe acute respiratory syndrome coronavirus 2
  REGION 1..14: note = Table B: HLA-DRB1*01:02L HLA-DPA1*03:01-B1*105:01L
MNSQGLLPPKNSID

SEQ ID NO: 19565 - protein, 14 aa, Severe acute respiratory syndrome coronavirus 2
  REGION 1..14: note = Table B: HLA-DRB1*01:02L
QGLLPPKNSIDAFK

SEQ ID NO: 19566 - protein, 15 aa, Severe acute respiratory syndrome coronavirus 2
  REGION 1..15: note = Table B: HLA-DRB1*01:02L
VQSKMSDVKCTSVVL

SEQ ID NO: 19567 - protein, 12 aa, Severe acute respiratory syndrome coronavirus 2
  REGION 1..12: note = Table B: HLA-DRB1*01:02L
QLRVESSSKLWA

SEQ ID NO: 19568 - protein, 14 aa, Severe acute respiratory syndrome coronavirus 2
  REGION 1..14: note = Table B: HLA-DRB1*01:02L HLA-DRB1*15:03L
AQCVQLHNDILLAK

SEQ ID NO: 19569 - protein, 12 aa, Severe acute respiratory syndrome coronavirus 2
  REGION 1..12: note = Table B: HLA-DRB1*01:02L HLA-DRB1*15:03L
VQLHNDILLAKD

SEQ ID NO: 19570 - protein, 11 aa, Severe acute respiratory syndrome coronavirus 2
  REGION 1..11: note = Table B: HLA-DRB1*01:02L HLA-DPA1*01:03-B1*03:01L HLA-DPA1*02:01-B1*13:01L
TTEAFEKMVSL

SEQ ID NO: 19571 - protein, 14 aa, Severe acute respiratory syndrome coronavirus 2
  REGION 1..14: note = Table B: HLA-DRB1*01:02L
GAVDINKLCEEMLD

SEQ ID NO: 19572 - protein, 13 aa, Severe acute respiratory syndrome coronavirus 2
  REGION 1..13: note = Table B: HLA-DRB1*01:02L HLA-DQA1*05:05-B1*03:01L
NRATLQAIASEFS

SEQ ID NO: 19573 - protein, 14 aa, Severe acute respiratory syndrome coronavirus 2
  REGION 1..14: note = Table B: HLA-DRB1*01:02L
ATLQAIASEFSSLP

SEQ ID NO: 19574 - protein, 15 aa, Severe acute respiratory syndrome coronavirus 2
  REGION 1..15: note = Table B: HLA-DRB1*01:02L HLA-DRB1*04:08L
LQAIASEFSSLPSYA

SEQ ID NO: 19575 - protein, 12 aa, Severe acute respiratory syndrome coronavirus 2
  REGION 1..12: note = Table B: HLA-DRB1*01:02L HLA-DRB4*03:01NL HLA-DQA1*01:01-B1*05:01L HLA-DRB1*08:01L HLA-DQA1*01-B1*05L HLA-DQA1*05:05-B1*03:116L HLA-DRB1*04:10L HLA-DRB1*12:01L HLA-DRB1*12:02L HLA-DRB1*14:54L HLA-DRB1*10:01L HLA-DRB1*04:08L
  REGION 1..12: note = CONT. FROM ABOVE: HLA-DRB1*08:03L
AAFATAQEAYEQ

SEQ ID NO: 19576 - protein, 12 aa, Severe acute respiratory syndrome coronavirus 2
  REGION 1..12: note = Table B: HLA-DRB1*01:02L HLA-DRB1*04:10L HLA-DPA1*02:01-B1*13:01L HLA-DRB1*07:01L HLA-DRB1*04:08L
AVANGDSEVVLK

SEQ ID NO: 19577 - protein, 12 aa, Severe acute respiratory syndrome coronavirus 2
  REGION 1..12: note = Table B: HLA-DRB1*01:02L HLA-DRB1*04:08L
VANGDSEVVLKK

SEQ ID NO: 19578 - protein, 15 aa, Severe acute respiratory syndrome coronavirus 2
  REGION 1..15: note = Table B: HLA-DRB1*01:02L
DRDAAMQRKLEKMAD

SEQ ID NO: 19579 - protein, 14 aa, Severe acute respiratory syndrome coronavirus 2
  REGION 1..14: note = Table B: HLA-DRB1*01:02L
LEKMADQAMTQMYK

SEQ ID NO: 19580 - protein, 14 aa, Severe acute respiratory syndrome coronavirus 2
  REGION 1..14: note = Table B: HLA-DRB1*01:02L
MADQAMTQMYKQAR

SEQ ID NO: 19581 - protein, 13 aa, Severe acute respiratory syndrome coronavirus 2
  REGION 1..13: note = Table B: HLA-DRB1*01:02L HLA-DRB1*16:01L HLA-DRB1*15:03L
QAMTQMYKQARSE

SEQ ID NO: 19582 - protein, 11 aa, Severe acute respiratory syndrome coronavirus 2
  REGION 1..11: note = Table B: HLA-DRB1*01:02L HLA-DRB1*16:01L
MYKQARSEDKR

SEQ ID NO: 19583 - protein, 12 aa, Severe acute respiratory syndrome coronavirus 2
  REGION 1..12: note = Table B: HLA-DRB1*01:02L HLA-DRB1*16:01L HLA-DRB1*04:08L
YKQARSEDKRAK

SEQ ID NO: 19584 - protein, 14 aa, Severe acute respiratory syndrome coronavirus 2
  REGION 1..14: note = Table B: HLA-DRB1*01:02L HLA-DPA1*01:03-B1*03:01L HLA-DRB1*12:01L
RAKVTSAMQTMLFT

SEQ ID NO: 19585 - protein, 14 aa, Severe acute respiratory syndrome coronavirus 2
  REGION 1..14: note = Table B: HLA-DRB1*01:02L
VTSAMQTMLFTMLR

SEQ ID NO: 19586 - protein, 13 aa, Severe acute respiratory syndrome coronavirus 2
  REGION 1..13: note = Table B: HLA-DRB1*01:02L HLA-DRB1*08:01L HLA-DPA1*01:03-B1*02:01L
SAMQTMLFTMLRK

SEQ ID NO: 19587 - protein, 13 aa, Severe acute respiratory syndrome coronavirus 2
  REGION 1..13: note = Table B: HLA-DRB1*01:02L HLA-DPA1*03:01-B1*04:02L HLA-DQA1*01:01-B1*05:01L HLA-DPA1*01:03-B1*104:01L
TAAKLMVVIPDYN

SEQ ID NO: 19588 - protein, 12 aa, Severe acute respiratory syndrome coronavirus 2
  REGION 1..12: note = Table B: HLA-DRB1*01:02L HLA-DRB3*02:01L
KLMVVIPDYNTY

SEQ ID NO: 19589 - protein, 11 aa, Severe acute respiratory syndrome coronavirus 2
  REGION 1..11: note = Table B: HLA-DRB1*01:02L
KIVQLSEISMD

SEQ ID NO: 19590 - protein, 13 aa, Severe acute respiratory syndrome coronavirus 2
  REGION 1..13: note = Table B: HLA-DRB1*01:02L
LAWPLIVTALRAN

SEQ ID NO: 19591 - protein, 13 aa, Severe acute respiratory syndrome coronavirus 2
  REGION 1..13: note = Table B: HLA-DRB1*01:02L
PLIVTALRANSAV

SEQ ID NO: 19592 - protein, 12 aa, Severe acute respiratory syndrome coronavirus 2
  REGION 1..12: note = Table B: HLA-DRB1*01:02L HLA-DRB1*04:08L
RANSAVKLQNNE

SEQ ID NO: 19593 - protein, 12 aa, Severe acute respiratory syndrome coronavirus 2
  REGION 1..12: note = Table B: HLA-DRB1*01:02L HLA-DRB1*15:03L
ANSAVKLQNNEL

SEQ ID NO: 19594 - protein, 14 aa, Severe acute respiratory syndrome coronavirus 2
  REGION 1..14: note = Table B: HLA-DRB1*01:02L
PVALRQMSCAAGTT

SEQ ID NO: 19595 - protein, 12 aa, Severe acute respiratory syndrome coronavirus 2
  REGION 1..12: note = Table B: HLA-DRB1*01:02L HLA-DRB1*08:04L HLA-DPA1*02:01-B1*13:01L HLA-DRB1*15:03L
VLALLSDLQDLK

SEQ ID NO: 19596 - protein, 14 aa, Severe acute respiratory syndrome coronavirus 2
  REGION 1..14: note = Table B: HLA-DRB1*01:02L HLA-DRB3*01:01L
LALLSDLQDLKWAR

SEQ ID NO: 19597 - protein, 13 aa, Severe acute respiratory syndrome coronavirus 2
  REGION 1..13: note = Table B: HLA-DRB1*01:02L HLA-DRB1*12:01L HLA-DQA1*01:03-B1*06:01L HLA-DQA1*02:01-B1*03:03L HLA-DRB1*15:03L
SDLQDLKWARFPK

SEQ ID NO: 19598 - protein, 14 aa, Severe acute respiratory syndrome coronavirus 2
  REGION 1..14: note = Table B: HLA-DRB1*01:02L HLA-DPA1*02:01-B1*13:01L
EPPCRFVTDTPKGP

SEQ ID NO: 19599 - protein, 13 aa, Severe acute respiratory syndrome coronavirus 2
  REGION 1..13: note = Table B: HLA-DRB1*01:02L HLA-DQA1*05:05-B1*03:116L HLA-DRB3*01:01L HLA-DRB1*08:02L HLA-DRB1*15:03L
LGSLAATVRLQAG

SEQ ID NO: 19600 - protein, 16 aa, Severe acute respiratory syndrome coronavirus 2
  REGION 1..16: note = Table B: HLA-DRB1*01:02L HLA-DPA1*01:03-B1*03:01L HLA-DRB1*12:01L HLA-DPA1*01:03-B1*104:01L
VPANSTVLSFCAFAVD

SEQ ID NO: 19601 - protein, 15 aa, Severe acute respiratory syndrome coronavirus 2
  REGION 1..15: note = Table B: HLA-DRB1*01:02L HLA-DRB1*08:04L
QPITNCVKMLCTHTG

SEQ ID NO: 19602 - protein, 15 aa, Severe acute respiratory syndrome coronavirus 2
  REGION 1..15: note = Table B: HLA-DRB1*01:02L
ITVTPEANMDQESFG

SEQ ID NO: 19603 - protein, 15 aa, Severe acute respiratory syndrome coronavirus 2
  REGION 1..15: note = Table B: HLA-DRB1*01:02L
HPNPKGFCDLKGKYV

SEQ ID NO: 19604 - protein, 14 aa, Severe acute respiratory syndrome coronavirus 2
  REGION 1..14: note = Table B: HLA-DRB1*01:02L HLA-DRB1*14:01L HLA-DRB1*12:01L HLA-DRB1*16:01L HLA-DRB1*15:03L
NPKGFCDLKGKYVQ

SEQ ID NO: 19605 - protein, 13 aa, Severe acute respiratory syndrome coronavirus 2
  REGION 1..13: note = Table B: HLA-DRB1*01:02L
KYVQIPTTCANDP

SEQ ID NO: 19606 - protein, 12 aa, Severe acute respiratory syndrome coronavirus 2
  REGION 1..12: note = Table B: HLA-DRB1*01:02L
FLNRVCGVSAAR

SEQ ID NO: 19607 - protein, 14 aa, Severe acute respiratory syndrome coronavirus 2
  REGION 1..14: note = Table B: HLA-DRB1*01:02L HLA-DRB1*04:08L
GTGTSTDVVYRAFD

SEQ ID NO: 19608 - protein, 12 aa, Severe acute respiratory syndrome coronavirus 2
  REGION 1..12: note = Table B: HLA-DRB1*01:02L HLA-DRB1*08:01L HLA-DRB1*12:01L HLA-DRB1*15:03L
KVAGFAKFLKTN

SEQ ID NO: 19609 - protein, 14 aa, Severe acute respiratory syndrome coronavirus 2
  REGION 1..14: note = Table B: HLA-DRB1*01:02L HLA-DRB1*11:01L
VAGFAKFLKTNCCR

SEQ ID NO: 19610 - protein, 16 aa, Severe acute respiratory syndrome coronavirus 2
  REGION 1..16: note = Table B: HLA-DRB1*01:02L HLA-DPA1*02:01-B1*13:01L
LKTNCCRFQEKDEDDN

SEQ ID NO: 19611 - protein, 12 aa, Severe acute respiratory syndrome coronavirus 2
  REGION 1..12: note = Table B: HLA-DRB1*01:02L HLA-DRB1*12:01L HLA-DPA1*03:01-B1*105:01L HLA-DRB1*15:03L
LIDSYFVVKRHT

SEQ ID NO: 19612 - protein, 12 aa, Severe acute respiratory syndrome coronavirus 2
  REGION 1..12: note = Table B: HLA-DRB1*01:02L HLA-DRB1*16:01L HLA-DRB1*04:08L
VVKRHTFSNYQH

SEQ ID NO: 19613 - protein, 13 aa, Severe acute respiratory syndrome coronavirus 2
  REGION 1..13: note = Table B: HLA-DRB1*01:02L HLA-DRB1*08:01L HLA-DPA1*02:01-B1*13:01L
VKRHTFSNYQHEE

SEQ ID NO: 19614 - protein, 13 aa, Severe acute respiratory syndrome coronavirus 2
  REGION 1..13: note = Table B: HLA-DRB1*01:02L
ETIYNLLKDCPAV

SEQ ID NO: 19615 - protein, 12 aa, Severe acute respiratory syndrome coronavirus 2
  REGION 1..12: note = Table B: HLA-DRB1*01:02L HLA-DRB1*15:03L
LKDCPAVAKHDF

SEQ ID NO: 19616 - protein, 12 aa, Severe acute respiratory syndrome coronavirus 2
  REGION 1..12: note = Table B: HLA-DRB1*01:02L
PAVAKHDFFKFR

SEQ ID NO: 19617 - protein, 12 aa, Severe acute respiratory syndrome coronavirus 2
  REGION 1..12: note = Table B: HLA-DRB1*01:02L HLA-DRB1*04:08L
RIDGDMVPHISR

SEQ ID NO: 19618 - protein, 12 aa, Severe acute respiratory syndrome coronavirus 2
  REGION 1..12: note = Table B: HLA-DRB1*01:02L HLA-DRB3*01:01L HLA-DRB1*04:08L HLA-DRB1*15:03L
DMVPHISRQRLT

SEQ ID NO: 19619 - protein, 12 aa, Severe acute respiratory syndrome coronavirus 2
  REGION 1..12: note = Table B: HLA-DRB1*01:02L
MVPHISRQRLTK

SEQ ID NO: 19620 - protein, 13 aa, Severe acute respiratory syndrome coronavirus 2
  REGION 1..13: note = Table B: HLA-DRB1*01:02L HLA-DRB1*16:01L
VPHISRQRLTKYT

SEQ ID NO: 19621 - protein, 14 aa, Severe acute respiratory syndrome coronavirus 2
  REGION 1..14: note = Table B: HLA-DRB1*01:02L
ISRQRLTKYTMADL

SEQ ID NO: 19622 - protein, 14 aa, Severe acute respiratory syndrome coronavirus 2
  REGION 1..14: note = Table B: HLA-DRB1*01:02L
SRQRLTKYTMADLV

SEQ ID NO: 19623 - protein, 12 aa, Severe acute respiratory syndrome coronavirus 2
  REGION 1..12: note = Table B: HLA-DRB1*01:02L HLA-DRB1*04:08L
KYTMADLVYALR

SEQ ID NO: 19624 - protein, 12 aa, Severe acute respiratory syndrome coronavirus 2
  REGION 1..12: note = Table B: HLA-DRB1*01:02L
YTMADLVYALRH

SEQ ID NO: 19625 - protein, 14 aa, Severe acute respiratory syndrome coronavirus 2
  REGION 1..14: note = Table B: HLA-DRB1*01:02L
TMADLVYALRHFDE

SEQ ID NO: 19626 - protein, 13 aa, Severe acute respiratory syndrome coronavirus 2
  REGION 1..13: note = Table B: HLA-DRB1*01:02L HLA-DRB1*12:01L
VYALRHFDEGNCD

SEQ ID NO: 19627 - protein, 12 aa, Severe acute respiratory syndrome coronavirus 2
  REGION 1..12: note = Table B: HLA-DRB1*01:02L HLA-DQA1*01-B1*05L HLA-DRB1*16:01L HLA-DRB1*15:03L
ALRHFDEGNCDT

SEQ ID NO: 19628 - protein, 14 aa, Severe acute respiratory syndrome coronavirus 2
  REGION 1..14: note = Table B: HLA-DRB1*01:02L HLA-DRB1*04:08L
LRHFDEGNCDTLKE

SEQ ID NO: 19629 - protein, 14 aa, Severe acute respiratory syndrome coronavirus 2
  REGION 1..14: note = Table B: HLA-DRB1*01:02L
GNCDTLKEILVTYN

SEQ ID NO: 19630 - protein, 16 aa, Severe acute respiratory syndrome coronavirus 2
  REGION 1..16: note = Table B: HLA-DRB1*01:02L
DTLKEILVTYNCCDDD

SEQ ID NO: 19631 - protein, 14 aa, Severe acute respiratory syndrome coronavirus 2
  REGION 1..14: note = Table B: HLA-DRB1*01:02L HLA-DRB1*15:03L
VTYNCCDDDYFNKK

SEQ ID NO: 19632 - protein, 13 aa, Severe acute respiratory syndrome coronavirus 2
  REGION 1..13: note = Table B: HLA-DRB1*01:02L HLA-DRB1*08:01L HLA-DRB1*12:01L
KKDWYDFVENPDI

SEQ ID NO: 19633 - protein, 11 aa, Severe acute respiratory syndrome coronavirus 2
  REGION 1..11: note = Table B: HLA-DRB1*01:02L HLA-DRB1*08:77L HLA-DPA1*01:03-B1*03:01L HLA-DQA1*05:05-B1*03:19L HLA-DRB1*04:10L HLA-DRB1*10:01L HLA-DRB1*04:08L HLA-DRB1*15:03L
YDFVENPDILR

SEQ ID NO: 19634 - protein, 14 aa, Severe acute respiratory syndrome coronavirus 2
  REGION 1..14: note = Table B: HLA-DRB1*01:02L
ANLGERVRQALLKT

SEQ ID NO: 19635 - protein, 12 aa, Severe acute respiratory syndrome coronavirus 2
  REGION 1..12: note = Table B: HLA-DRB1*01:02L
ERVRQALLKTVQ

SEQ ID NO: 19636 - protein, 12 aa, Severe acute respiratory syndrome coronavirus 2
  REGION 1..12: note = Table B: HLA-DRB1*01:02L HLA-DRB1*12:01L
RVRQALLKTVQF

SEQ ID NO: 19637 - protein, 14 aa, Severe acute respiratory syndrome coronavirus 2
  REGION 1..14: note = Table B: HLA-DRB1*01:02L HLA-DRB1*08:01L HLA-DRB1*11:01L HLA-DRB1*12:01L HLA-DQA1*02:01-B1*03:03L HLA-DRB1*15:03L
QALLKTVQFCDAMR

SEQ ID NO: 19638 - protein, 14 aa, Severe acute respiratory syndrome coronavirus 2
  REGION 1..14: note = Table B: HLA-DRB1*01:02L HLA-DQA1*05:05-B1*03:19L HLA-DPA1*03:01-B1*105:01L HLA-DRB1*04:08L HLA-DRB1*15:03L
VQFCDAMRNAGIVG

SEQ ID NO: 19639 - protein, 14 aa, Severe acute respiratory syndrome coronavirus 2
  REGION 1..14: note = Table B: HLA-DRB1*01:02L HLA-DPA1*01:03-B1*03:01L HLA-DRB1*08:01L HLA-DQA1*05:05-B1*03:19L HLA-DRB1*12:01L HLA-DRB1*15:03L
NWYDFGDFIQTTPG

SEQ ID NO: 19640 - protein, 13 aa, Severe acute respiratory syndrome coronavirus 2
  REGION 1..13: note = Table B: HLA-DRB1*01:02L HLA-DPA1*01:02-B1*04:01L
VDSYYSLLMPILT

SEQ ID NO: 19641 - protein, 13 aa, Severe acute respiratory syndrome coronavirus 2
  REGION 1..13: note = Table B: HLA-DRB1*01:02L
SYYSLLMPILTLT

SEQ ID NO: 19642 - protein, 14 aa, Severe acute respiratory syndrome coronavirus 2
  REGION 1..14: note = Table B: HLA-DRB1*01:02L HLA-DPA1*03:01-B1*105:01L
SLLMPILTLTRALT

SEQ ID NO: 19643 - protein, 16 aa, Severe acute respiratory syndrome coronavirus 2
  REGION 1..16: note = Table B: HLA-DRB1*01:02L
RALTAESHVDTDLTKP

SEQ ID NO: 19644 - protein, 12 aa, Severe acute respiratory syndrome coronavirus 2
  REGION 1..12: note = Table B: HLA-DRB1*01:02L HLA-DRB3*01:01L HLA-DRB1*04:08L
HVDTDLTKPYIK

SEQ ID NO: 19645 - protein, 15 aa, Severe acute respiratory syndrome coronavirus 2
  REGION 1..15: note = Table B: HLA-DRB1*01:02L
DTDLTKPYIKWDLLK

SEQ ID NO: 19646 - protein, 12 aa, Severe acute respiratory syndrome coronavirus 2
  REGION 1..12: note = Table B: HLA-DRB1*01:02L HLA-DPA1*03:01-B1*04:02L HLA-DRB1*08:01L HLA-DQA1*01-B1*05L HLA-DRB1*12:01L HLA-DPA1*03:01-B1*105:01L HLA-DPA1*01:02-B1*04:01L HLA-DRB1*04:08L HLA-DRB1*15:03L
KPYIKWDLLKYD

SEQ ID NO: 19647 - protein, 13 aa, Severe acute respiratory syndrome coronavirus 2
  REGION 1..13: note = Table B: HLA-DRB1*01:02L HLA-DRB1*08:04L HLA-DPA1*01:03-B1*03:01L HLA-DPA1*03:01-B1*04:02L HLA-DRB1*14:01L HLA-DRB3*01:01L HLA-DPA1*02:01-B1*13:01L HLA-DRB1*04:08L
WDLLKYDFTEERL

SEQ ID NO: 19648 - protein, 13 aa, Severe acute respiratory syndrome coronavirus 2
  REGION 1..13: note = Table B: HLA-DRB1*01:02L HLA-DPA1*01:02-B1*04:01L HLA-DRB1*15:03L
DFTEERLKLFDRY

SEQ ID NO: 19649 - protein, 13 aa, Severe acute respiratory syndrome coronavirus 2
  REGION 1..13: note = Table B: HLA-DRB1*01:02L
TEERLKLFDRYFK

SEQ ID NO: 19650 - protein, 13 aa, Severe acute respiratory syndrome coronavirus 2
  REGION 1..13: note = Table B: HLA-DRB1*01:02L HLA-DRB1*08:01L HLA-DQA1*01-B1*05L HLA-DRB1*12:01L HLA-DPA1*01:02-B1*04:01L HLA-DRB1*04:08L HLA-DRB1*15:03L
DRYFKYWDQTYHP

SEQ ID NO: 19651 - protein, 14 aa, Severe acute respiratory syndrome coronavirus 2
  REGION 1..14: note = Table B: HLA-DRB1*01:02L HLA-DRB1*15:03L
QTYHPNCVNCLDDR

SEQ ID NO: 19652 - protein, 15 aa, Severe acute respiratory syndrome coronavirus 2
  REGION 1..15: note = Table B: HLA-DRB1*01:02L
HPNCVNCLDDRCILH

SEQ ID NO: 19653 - protein, 14 aa, Severe acute respiratory syndrome coronavirus 2
  REGION 1..14: note = Table B: HLA-DRB1*01:02L HLA-DPA1*01:03-B1*03:01L HLA-DPA1*02:01-B1*13:01L
DDRCILHCANFNVL

SEQ ID NO: 19654 - protein, 14 aa, Severe acute respiratory syndrome coronavirus 2
  REGION 1..14: note = Table B: HLA-DRB1*01:02L HLA-DPA1*01:03-B1*04:02L
NVLFSTVFPPTSFG

SEQ ID NO: 19655 - protein, 14 aa, Severe acute respiratory syndrome coronavirus 2
  REGION 1..14: note = Table B: HLA-DRB1*01:02L HLA-DPA1*01:03-B1*04:02L
VLFSTVFPPTSFGP

SEQ ID NO: 19656 - protein, 13 aa, Severe acute respiratory syndrome coronavirus 2
  REGION 1..13: note = Table B: HLA-DRB1*01:02L HLA-DPA1*01:03-B1*03:01L HLA-DQA1*05:05-B1*03:01L
FSTVFPPTSFGPL

SEQ ID NO: 19657 - protein, 13 aa, Severe acute respiratory syndrome coronavirus 2
  REGION 1..13: note = Table B: HLA-DRB1*01:02L
TVFPPTSFGPLVR

SEQ ID NO: 19658 - protein, 12 aa, Severe acute respiratory syndrome coronavirus 2
  REGION 1..12: note = Table B: HLA-DRB1*01:02L HLA-DRB1*16:01L
FPPTSFGPLVRK

SEQ ID NO: 19659 - protein, 16 aa, Severe acute respiratory syndrome coronavirus 2
  REGION 1..16: note = Table B: HLA-DRB1*01:02L HLA-DRB1*08:04L HLA-DRB1*11:04L HLA-DRB1*11:01L
PPTSFGPLVRKIFVDG

SEQ ID NO: 19660 - protein, 13 aa, Severe acute respiratory syndrome coronavirus 2
  REGION 1..13: note = Table B: HLA-DRB1*01:02L HLA-DRB1*16:01L HLA-DRB1*15:03L
PLVRKIFVDGVPF

SEQ ID NO: 19661 - protein, 14 aa, Severe acute respiratory syndrome coronavirus 2
  REGION 1..14: note = Table B: HLA-DRB1*01:02L
VHNQDVNLHSSRLS

SEQ ID NO: 19662 - protein, 13 aa, Severe acute respiratory syndrome coronavirus 2
  REGION 1..13: note = Table B: HLA-DRB1*01:02L HLA-DRB1*12:01L HLA-DRB1*04:08L HLA-DRB1*15:03L
SFKELLVYAADPA

SEQ ID NO: 19663 - protein, 12 aa, Severe acute respiratory syndrome coronavirus 2
  REGION 1..12: note = Table B: HLA-DRB1*01:02L
AMHAASGNLLLD

SEQ ID NO: 19664 - protein, 15 aa, Severe acute respiratory syndrome coronavirus 2
  REGION 1..15: note = Table B: HLA-DRB1*01:02L HLA-DPA1*03:01-B1*105:01L HLA-DQA1*05:05-B1*03:01L HLA-DQA1*01:03-B1*06:01L HLA-DQA1*02:01-B1*03:03L
DKRTTCFSVAALTNN

SEQ ID NO: 19665 - protein, 15 aa, Severe acute respiratory syndrome coronavirus 2
  REGION 1..15: note = Table B: HLA-DRB1*01:02L
RTTCFSVAALTNNVA

SEQ ID NO: 19666 - protein, 11 aa, Severe acute respiratory syndrome coronavirus 2
  REGION 1..11: note = Table B: HLA-DRB1*01:02L HLA-DRB4*03:01NL HLA-DPA1*03:01-B1*04:02L HLA-DQA1*01-B1*05L HLA-DPA1*01:03-B1*04:01L HLA-DPA1*01:03-B1*04:02L HLA-DQA1*05:05-B1*03:01L HLA-DPA1*01:02-B1*04:01L
  REGION 1..11: note = CONT. FROM ABOVE: HLA-DRB1*10:01L
SVAALTNNVAF

SEQ ID NO: 19667 - protein, 13 aa, Severe acute respiratory syndrome coronavirus 2
  REGION 1..13: note = Table B: HLA-DRB1*01:02L HLA-DRB1*08:04L HLA-DRB1*15:03L
LTNNVAFQTVKPG

SEQ ID NO: 19668 - protein, 15 aa, Severe acute respiratory syndrome coronavirus 2
  REGION 1..15: note = Table B: HLA-DRB1*01:02L
PGNFNKDFYDFAVSK

SEQ ID NO: 19669 - protein, 15 aa, Severe acute respiratory syndrome coronavirus 2
  REGION 1..15: note = Table B: HLA-DRB1*01:02L HLA-DRB1*08:01L
AQDGNAAISDYDYYR

SEQ ID NO: 19670 - protein, 12 aa, Severe acute respiratory syndrome coronavirus 2
  REGION 1..12: note = Table B: HLA-DRB1*01:02L HLA-DRB1*14:01L
AAISDYDYYRYN

SEQ ID NO: 19671 - protein, 14 aa, Severe acute respiratory syndrome coronavirus 2
  REGION 1..14: note = Table B: HLA-DRB1*01:02L HLA-DRB1*14:01L
AISDYDYYRYNLPT

SEQ ID NO: 19672 - protein, 13 aa, Severe acute respiratory syndrome coronavirus 2
  REGION 1..13: note = Table B: HLA-DRB1*01:02L HLA-DPA1*03:01-B1*105:01L HLA-DRB1*16:01L HLA-DRB1*15:03L
DKYFDCYDGGCIN

SEQ ID NO: 19673 - protein, 14 aa, Severe acute respiratory syndrome coronavirus 2
  REGION 1..14: note = Table B: HLA-DRB1*01:02L HLA-DRB1*08:01L
PFNKWGKARLYYDS

SEQ ID NO: 19674 - protein, 14 aa, Severe acute respiratory syndrome coronavirus 2
  REGION 1..14: note = Table B: HLA-DRB1*01:02L HLA-DRB1*08:04L HLA-DPA1*01:03-B1*03:01L HLA-DPA1*01:03-B1*04:02L HLA-DPA1*01:02-B1*04:01L HLA-DQA1*01:03-B1*06:01L
ARLYYDSMSYEDQD

SEQ ID NO: 19675 - protein, 14 aa, Severe acute respiratory syndrome coronavirus 2
  REGION 1..14: note = Table B: HLA-DRB1*01:02L HLA-DRB1*04:08L
SMSYEDQDALFAYT

SEQ ID NO: 19676 - protein, 13 aa, Severe acute respiratory syndrome coronavirus 2
  REGION 1..13: note = Table B: HLA-DRB1*01:02L HLA-DQA1*05:05-B1*03:01L HLA-DRB1*04:08L
SYEDQDALFAYTK

SEQ ID NO: 19677 - protein, 13 aa, Severe acute respiratory syndrome coronavirus 2
  REGION 1..13: note = Table B: HLA-DRB1*01:02L HLA-DPA1*01:03-B1*03:01L HLA-DPA1*02:01-B1*13:01L HLA-DRB1*16:01L HLA-DRB1*15:03L
TKRNVIPTITQMN

SEQ ID NO: 19678 - protein, 14 aa, Severe acute respiratory syndrome coronavirus 2
  REGION 1..14: note = Table B: HLA-DRB1*01:02L HLA-DPA1*03:01-B1*105:01L
TVAGVSICSTMTNR

SEQ ID NO: 19679 - protein, 12 aa, Severe acute respiratory syndrome coronavirus 2
  REGION 1..12: note = Table B: HLA-DRB1*01:02L HLA-DRB1*12:01L HLA-DPA1*03:01-B1*105:01L HLA-DRB1*15:03L
VSICSTMTNRQF

SEQ ID NO: 19680 - protein, 13 aa, Severe acute respiratory syndrome coronavirus 2
  REGION 1..13: note = Table B: HLA-DRB1*01:02L
ICSTMTNRQFHQK

SEQ ID NO: 19681 - protein, 14 aa, Severe acute respiratory syndrome coronavirus 2
  REGION 1..14: note = Table B: HLA-DRB1*01:02L
STMTNRQFHQKLLK

SEQ ID NO: 19682 - protein, 14 aa, Severe acute respiratory syndrome coronavirus 2
  REGION 1..14: note = Table B: HLA-DRB1*01:02L
TMTNRQFHQKLLKS

SEQ ID NO: 19683 - protein, 14 aa, Severe acute respiratory syndrome coronavirus 2
  REGION 1..14: note = Table B: HLA-DRB1*01:02L HLA-DRB1*11:01L HLA-DRB1*12:01L HLA-DPA1*03:01-B1*105:01L HLA-DRB1*15:03L
RQFHQKLLKSIAAT

SEQ ID NO: 19684 - protein, 13 aa, Severe acute respiratory syndrome coronavirus 2
  REGION 1..13: note = Table B: HLA-DRB1*01:02L
FHQKLLKSIAATR

SEQ ID NO: 19685 - protein, 12 aa, Severe acute respiratory syndrome coronavirus 2
  REGION 1..12: note = Table B: HLA-DRB1*01:02L
KLLKSIAATRGA

SEQ ID NO: 19686 - protein, 13 aa, Severe acute respiratory syndrome coronavirus 2
  REGION 1..13: note = Table B: HLA-DRB1*01:02L HLA-DRB1*08:04L
GATVVIGTSKFYG

SEQ ID NO: 19687 - protein, 14 aa, Severe acute respiratory syndrome coronavirus 2
  REGION 1..14: note = Table B: HLA-DRB1*01:02L
ATVVIGTSKFYGGW

SEQ ID NO: 19688 - protein, 14 aa, Severe acute respiratory syndrome coronavirus 2
  REGION 1..14: note = Table B: HLA-DRB1*01:02L HLA-DRB1*16:01L
MPNMLRIMASLVLA

SEQ ID NO: 19689 - protein, 14 aa, Severe acute respiratory syndrome coronavirus 2
  REGION 1..14: note = Table B: HLA-DRB1*01:02L
KHTTCCSLSHRFYR

SEQ ID NO: 19690 - protein, 14 aa, Severe acute respiratory syndrome coronavirus 2
  REGION 1..14: note = Table B: HLA-DRB1*01:02L HLA-DRB1*15:03L
LSEMVMCGGSLYVK

SEQ ID NO: 19691 - protein, 16 aa, Severe acute respiratory syndrome coronavirus 2
  REGION 1..16: note = Table B: HLA-DRB1*01:02L
YVKPGGTSSGDATTAY

SEQ ID NO: 19692 - protein, 13 aa, Severe acute respiratory syndrome coronavirus 2
  REGION 1..13: note = Table B: HLA-DRB1*01:02L HLA-DRB1*08:01L HLA-DRB1*11:01L HLA-DPA1*01:03-B1*104:01L
TTAYANSVFNICQ

SEQ ID NO: 19693 - protein, 11 aa, Severe acute respiratory syndrome coronavirus 2
  REGION 1..11: note = Table B: HLA-DRB1*01:02L
LLSTDGNKIAD

SEQ ID NO: 19694 - protein, 14 aa, Severe acute respiratory syndrome coronavirus 2
  REGION 1..14: note = Table B: HLA-DRB1*01:02L
LSTDGNKIADKYVR

SEQ ID NO: 19695 - protein, 13 aa, Severe acute respiratory syndrome coronavirus 2
  REGION 1..13: note = Table B: HLA-DRB1*01:02L
NKIADKYVRNLQH

SEQ ID NO: 19696 - protein, 13 aa, Severe acute respiratory syndrome coronavirus 2
  REGION 1..13: note = Table B: HLA-DRB1*01:02L HLA-DRB1*04:08L
KIADKYVRNLQHR

SEQ ID NO: 19697 - protein, 13 aa, Severe acute respiratory syndrome coronavirus 2
  REGION 1..13: note = Table B: HLA-DRB1*01:02L HLA-DRB1*04:08L
RNRDVDTDFVNEF

SEQ ID NO: 19698 - protein, 12 aa, Severe acute respiratory syndrome coronavirus 2
  REGION 1..12: note = Table B: HLA-DRB1*01:02L HLA-DRB1*08:01L HLA-DRB1*15:03L
TDFVNEFYAYLR

SEQ ID NO: 19699 - protein, 12 aa, Severe acute respiratory syndrome coronavirus 2
  REGION 1..12: note = Table B: HLA-DRB1*01:02L HLA-DRB1*11:04L HLA-DRB1*08:01L HLA-DRB1*11:01L HLA-DRB3*01:01L HLA-DRB1*15:03L
DFVNEFYAYLRK

SEQ ID NO: 19700 - protein, 14 aa, Severe acute respiratory syndrome coronavirus 2
  REGION 1..14: note = Table B: HLA-DRB1*01:02L HLA-DRB1*16:01L HLA-DRB1*15:03L
AYLRKHFSMMILSD

SEQ ID NO: 19701 - protein, 12 aa, Severe acute respiratory syndrome coronavirus 2
  REGION 1..12: note = Table B: HLA-DRB1*01:02L HLA-DPA1*01:03-B1*03:01L HLA-DRB1*03:01L HLA-DRB1*12:01L HLA-DRB1*16:01L HLA-DRB1*15:03L
MILSDDAVVCFN

SEQ ID NO: 19702 - protein, 12 aa, Severe acute respiratory syndrome coronavirus 2
  REGION 1..12: note = Table B: HLA-DRB1*01:02L HLA-DPA1*01:03-B1*04:02L HLA-DRB1*04:08L
TYASQGLVASIK

SEQ ID NO: 19703 - protein, 11 aa, Severe acute respiratory syndrome coronavirus 2
  REGION 1..11: note = Table B: HLA-DRB1*01:02L
ASIKNFKSVLY

SEQ ID NO: 19704 - protein, 14 aa, Severe acute respiratory syndrome coronavirus 2
  REGION 1..14: note = Table B: HLA-DRB1*01:02L HLA-DRB1*08:04L HLA-DPA1*01:03-B1*04:02L HLA-DQA1*05:05-B1*03:01L HLA-DRB1*04:08L
NNVFMSEAKCWTET

SEQ ID NO: 19705 - protein, 14 aa, Severe acute respiratory syndrome coronavirus 2
  REGION 1..14: note = Table B: HLA-DRB1*01:02L HLA-DRB1*08:01L HLA-DRB1*04:08L
AKCWTETDLTKGPH

SEQ ID NO: 19706 - protein, 15 aa, Severe acute respiratory syndrome coronavirus 2
  REGION 1..15: note = Table B: HLA-DRB1*01:02L HLA-DPA1*02:01-B1*13:01L
DLTKGPHEFCSQHTM

SEQ ID NO: 19707 - protein, 15 aa, Severe acute respiratory syndrome coronavirus 2
  REGION 1..15: note = Table B: HLA-DRB1*01:02L
EFCSQHTMLVKQGDD

SEQ ID NO: 19708 - protein, 13 aa, Severe acute respiratory syndrome coronavirus 2
  REGION 1..13: note = Table B: HLA-DRB1*01:02L HLA-DRB1*14:01L HLA-DPA1*02:01-B1*13:01L HLA-DPA1*01:02-B1*04:01L HLA-DRB1*04:08L
SQHTMLVKQGDDY

SEQ ID NO: 19709 - protein, 14 aa, Severe acute respiratory syndrome coronavirus 2
  REGION 1..14: note = Table B: HLA-DRB1*01:02L
QHTMLVKQGDDYVY

SEQ ID NO: 19710 - protein, 15 aa, Severe acute respiratory syndrome coronavirus 2
  REGION 1..15: note = Table B: HLA-DRB1*01:02L
HTMLVKQGDDYVYLP

SEQ ID NO: 19711 - protein, 16 aa, Severe acute respiratory syndrome coronavirus 2
  REGION 1..16: note = Table B: HLA-DRB1*01:02L
VKQGDDYVYLPYPDPS

SEQ ID NO: 19712 - protein, 19 aa, Severe acute respiratory syndrome coronavirus 2
  REGION 1..19: note = Table B: HLA-DRB1*01:02L
YPDPSRILGAGCFVDDIVK

SEQ ID NO: 19713 - protein, 12 aa, Severe acute respiratory syndrome coronavirus 2
  REGION 1..12: note = Table B: HLA-DRB1*01:02L
VKTDGTLMIERF

SEQ ID NO: 19714 - protein, 12 aa, Severe acute respiratory syndrome coronavirus 2
  REGION 1..12: note = Table B: HLA-DRB1*01:02L HLA-DPA1*01:03-B1*03:01L HLA-DPA1*03:01-B1*04:02L HLA-DRB1*12:01L HLA-DPA1*02:01-B1*13:01L HLA-DPA1*03:01-B1*105:01L HLA-DRB1*16:01L
MIERFVSLAIDA

SEQ ID NO: 19715 - protein, 12 aa, Severe acute respiratory syndrome coronavirus 2
  REGION 1..12: note = Table B: HLA-DRB1*01:02L HLA-DPA1*01:03-B1*03:01L HLA-DPA1*03:01-B1*04:02L HLA-DQA1*05:01-B1*02:01L HLA-DRB1*12:01L HLA-DPA1*03:01-B1*105:01L HLA-DPA1*01:03-B1*104:01L
IERFVSLAIDAY

SEQ ID NO: 19716 - protein, 12 aa, Severe acute respiratory syndrome coronavirus 2
  REGION 1..12: note = Table B: HLA-DRB1*01:02L
AYPLTKHPNQEY

SEQ ID NO: 19717 - protein, 12 aa, Severe acute respiratory syndrome coronavirus 2
  REGION 1..12: note = Table B: HLA-DRB1*01:02L
YPLTKHPNQEYA

SEQ ID NO: 19718 - protein, 13 aa, Severe acute respiratory syndrome coronavirus 2
  REGION 1..13: note = Table B: HLA-DRB1*01:02L HLA-DPA1*02:01-B1*13:01L
TKHPNQEYADVFH

SEQ ID NO: 19719 - protein, 13 aa, Severe acute respiratory syndrome coronavirus 2
  REGION 1..13: note = Table B: HLA-DRB1*01:02L HLA-DRB3*02:01L
HPNQEYADVFHLY

SEQ ID NO: 19720 - protein, 12 aa, Severe acute respiratory syndrome coronavirus 2
  REGION 1..12: note = Table B: HLA-DRB1*01:02L HLA-DRB1*16:01L HLA-DRB1*15:03L
FHLYLQYIRKLH

SEQ ID NO: 19721 - protein, 13 aa, Severe acute respiratory syndrome coronavirus 2
  REGION 1..13: note = Table B: HLA-DRB1*01:02L
RKLHDELTGHMLD

SEQ ID NO: 19722 - protein, 12 aa, Severe acute respiratory syndrome coronavirus 2
  REGION 1..12: note = Table B: HLA-DRB1*01:02L
DELTGHMLDMYS

SEQ ID NO: 19723 - protein, 14 aa, Severe acute respiratory syndrome coronavirus 2
  REGION 1..14: note = Table B: HLA-DRB1*01:02L
HMLDMYSVMLTNDN

SEQ ID NO: 19724 - protein, 12 aa, Severe acute respiratory syndrome coronavirus 2
  REGION 1..12: note = Table B: HLA-DRB1*01:02L HLA-DRB1*08:04L HLA-DRB3*02:01L
VMLTNDNTSRYW

SEQ ID NO: 19725 - protein, 14 aa, Severe acute respiratory syndrome coronavirus 2
  REGION 1..14: note = Table B: HLA-DRB1*01:02L
SQTSLRCGACIRRP

SEQ ID NO: 19726 - protein, 14 aa, Severe acute respiratory syndrome coronavirus 2
  REGION 1..14: note = Table B: HLA-DRB1*01:02L
QTSLRCGACIRRPF

SEQ ID NO: 19727 - protein, 15 aa, Severe acute respiratory syndrome coronavirus 2
  REGION 1..15: note = Table B: HLA-DRB1*01:02L HLA-DPA1*02:01-B1*13:01L HLA-DPA1*03:01-B1*105:01L
VISTSHKLVLSVNPY

SEQ ID NO: 19728 - protein, 13 aa, Severe acute respiratory syndrome coronavirus 2
  REGION 1..13: note = Table B: HLA-DRB1*01:02L HLA-DRB1*12:01L HLA-DRB1*16:01L HLA-DRB1*15:03L
HKLVLSVNPYVCN

SEQ ID NO: 19729 - protein, 15 aa, Severe acute respiratory syndrome coronavirus 2
  REGION 1..15: note = Table B: HLA-DRB1*01:02L
DVTQLYLGGMSYYCK

SEQ ID NO: 19730 - protein, 15 aa, Severe acute respiratory syndrome coronavirus 2
  REGION 1..15: note = Table B: HLA-DRB1*01:02L
VTQLYLGGMSYYCKS

SEQ ID NO: 19731 - protein, 15 aa, Severe acute respiratory syndrome coronavirus 2
  REGION 1..15: note = Table B: HLA-DRB1*01:02L
TQLYLGGMSYYCKSH

SEQ ID NO: 19732 - protein, 16 aa, Severe acute respiratory syndrome coronavirus 2
  REGION 1..16: note = Table B: HLA-DRB1*01:02L HLA-DPA1*01:03-B1*03:01L HLA-DQA1*05:05-B1*03:19L HLA-DPA1*02:01-B1*13:01L HLA-DPA1*03:01-B1*105:01L HLA-DPA1*01:03-B1*104:01L HLA-DQA1*05:05-B1*03:01L HLA-DQA1*01:03-B1*06:01L
  REGION 1..16: note = CONT. FROM ABOVE: HLA-DQA1*02:01-B1*03:03L HLA-DRB1*15:03L
KPPISFPLCANGQVFG

SEQ ID NO: 19733 - protein, 12 aa, Severe acute respiratory syndrome coronavirus 2
  REGION 1..12: note = Table B: HLA-DRB1*01:02L HLA-DRB1*16:01L
QVFGLYKNTCVG

SEQ ID NO: 19734 - protein, 10 aa, Severe acute respiratory syndrome coronavirus 2
  REGION 1..10: note = Table B: HLA-DRB1*01:02L HLA-DQA1*01-B1*05L HLA-DRB1*16:01L HLA-DRB1*15:03L
LKLFAAETLK

SEQ ID NO: 19735 - protein, 13 aa, Severe acute respiratory syndrome coronavirus 2
  REGION 1..13: note = Table B: HLA-DRB1*01:02L
ETLKATEETFKLS

SEQ ID NO: 19736 - protein, 14 aa, Severe acute respiratory syndrome coronavirus 2
  REGION 1..14: note = Table B: HLA-DRB1*01:02L HLA-DPA1*02:01-B1*13:01L
TLKATEETFKLSYG

SEQ ID NO: 19737 - protein, 12 aa, Severe acute respiratory syndrome coronavirus 2
  REGION 1..12: note = Table B: HLA-DRB1*01:02L HLA-DPA1*01:03-B1*03:01L HLA-DRB1*12:01L
LSYGIATVREVL

SEQ ID NO: 19738 - protein, 12 aa, Severe acute respiratory syndrome coronavirus 2
  REGION 1..12: note = Table B: HLA-DRB1*01:02L
SYGIATVREVLS

SEQ ID NO: 19739 - protein, 14 aa, Severe acute respiratory syndrome coronavirus 2
  REGION 1..14: note = Table B: HLA-DRB1*01:02L HLA-DRB1*16:01L
DRELHLSWEVGKPR

SEQ ID NO: 19740 - protein, 12 aa, Severe acute respiratory syndrome coronavirus 2
  REGION 1..12: note = Table B: HLA-DRB1*01:02L HLA-DRB1*14:01L HLA-DRB1*08:01L HLA-DPA1*02:01-B1*13:01L HLA-DQA1*02:01-B1*03:03L HLA-DRB1*15:03L
NRNYVFTGYRVT

SEQ ID NO: 19741 - protein, 14 aa, Severe acute respiratory syndrome coronavirus 2
  REGION 1..14: note = Table B: HLA-DRB1*01:02L HLA-DRB1*12:01L HLA-DPA1*02:01-B1*13:01L HLA-DRB1*15:03L
SKVQIGEYTFEKGD

SEQ ID NO: 19742 - protein, 14 aa, Severe acute respiratory syndrome coronavirus 2
  REGION 1..14: note = Table B: HLA-DRB1*01:02L
YTFEKGDYGDAVVY

SEQ ID NO: 19743 - protein, 14 aa, Severe acute respiratory syndrome coronavirus 2
  REGION 1..14: note = Table B: HLA-DRB1*01:02L HLA-DRB1*04:08L
TFEKGDYGDAVVYR

SEQ ID NO: 19744 - protein, 14 aa, Severe acute respiratory syndrome coronavirus 2
  REGION 1..14: note = Table B: HLA-DRB1*01:02L
FEKGDYGDAVVYRG

SEQ ID NO: 19745 - protein, 10 aa, Severe acute respiratory syndrome coronavirus 2
  REGION 1..10: note = Table B: HLA-DRB1*01:02L HLA-DRB1*16:01L HLA-DQA1*02:01-B1*03:03L HLA-DRB1*15:03L
YRGTTTYKLN

SEQ ID NO: 19746 - protein, 13 aa, Severe acute respiratory syndrome coronavirus 2
  REGION 1..13: note = Table B: HLA-DRB1*01:02L HLA-DRB1*08:01L HLA-DRB1*04:08L
RGTTTYKLNVGDY

SEQ ID NO: 19747 - protein, 11 aa, Severe acute respiratory syndrome coronavirus 2
  REGION 1..11: note = Table B: HLA-DRB1*01:02L HLA-DRB1*12:01L HLA-DRB1*16:01L HLA-DRB1*15:03L
YFVLTSHTVMP

SEQ ID NO: 19748 - protein, 12 aa, Severe acute respiratory syndrome coronavirus 2
  REGION 1..12: note = Table B: HLA-DRB1*01:02L HLA-DPA1*01:03-B1*03:01L HLA-DQA1*05:05-B1*03:19L HLA-DRB1*15:03L
YVRITGLYPTLN

SEQ ID NO: 19749 - protein, 13 aa, Severe acute respiratory syndrome coronavirus 2
  REGION 1..13: note = Table B: HLA-DRB1*01:02L
RITGLYPTLNISD

SEQ ID NO: 19750 - protein, 15 aa, Severe acute respiratory syndrome coronavirus 2
  REGION 1..15: note = Table B: HLA-DRB1*01:02L HLA-DQA1*05:05-B1*03:01L
YPTLNISDEFSSNVA

SEQ ID NO: 19751 - protein, 12 aa, Severe acute respiratory syndrome coronavirus 2
  REGION 1..12: note = Table B: HLA-DRB1*01:02L
ANYQKVGMQKYS

SEQ ID NO: 19752 - protein, 12 aa, Severe acute respiratory syndrome coronavirus 2
  REGION 1..12: note = Table B: HLA-DRB1*01:02L
NYQKVGMQKYST

SEQ ID NO: 19753 - protein, 14 aa, Severe acute respiratory syndrome coronavirus 2
  REGION 1..14: note = Table B: HLA-DRB1*01:02L HLA-DQA1*01-B1*05L HLA-DRB1*04:08L HLA-DRB1*15:03L
KVGMQKYSTLQGPP

SEQ ID NO: 19754 - protein, 14 aa, Severe acute respiratory syndrome coronavirus 2
  REGION 1..14: note = Table B: HLA-DRB1*01:02L HLA-DPA1*01:03-B1*02:01L HLA-DQA1*05:05-B1*03:01L HLA-DRB1*04:08L
SHFAIGLALYYPSA

SEQ ID NO: 19755 - protein, 12 aa, Severe acute respiratory syndrome coronavirus 2
  REGION 1..12: note = Table B: HLA-DRB1*01:02L HLA-DRB1*12:01L
GLALYYPSARIV

SEQ ID NO: 19756 - protein, 15 aa, Severe acute respiratory syndrome coronavirus 2
  REGION 1..15: note = Table B: HLA-DRB1*01:02L HLA-DRB1*14:01L HLA-DRB1*12:01L HLA-DRB1*15:03L
VDALCEKALKYLPID

SEQ ID NO: 19757 - protein, 14 aa, Severe acute respiratory syndrome coronavirus 2
  REGION 1..14: note = Table B: HLA-DRB1*01:02L HLA-DRB1*14:01L HLA-DRB1*15:03L
LKYLPIDKCSRIIP

SEQ ID NO: 19758 - protein, 14 aa, Severe acute respiratory syndrome coronavirus 2
  REGION 1..14: note = Table B: HLA-DRB1*01:02L HLA-DRB1*04:08L
PIDKCSRIIPARAR

SEQ ID NO: 19759 - protein, 14 aa, Severe acute respiratory syndrome coronavirus 2
  REGION 1..14: note = Table B: HLA-DRB1*01:02L
IPARARVECFDKFK

SEQ ID NO: 19760 - protein, 13 aa, Severe acute respiratory syndrome coronavirus 2
  REGION 1..13: note = Table B: HLA-DRB1*01:02L HLA-DRB1*08:01L HLA-DRB3*01:01L HLA-DRB1*16:01L HLA-DRB1*04:08L
RARVECFDKFKVN

SEQ ID NO: 19761 - protein, 14 aa, Severe acute respiratory syndrome coronavirus 2
  REGION 1..14: note = Table B: HLA-DRB1*01:02L HLA-DPA1*03:01-B1*04:02L HLA-DPA1*01:03-B1*04:02L HLA-DRB1*04:08L HLA-DRB1*15:03L
QYVFCTVNALPETT

SEQ ID NO: 19762 - protein, 15 aa, Severe acute respiratory syndrome coronavirus 2
  REGION 1..15: note = Table B: HLA-DRB1*01:02L HLA-DPA1*01:03-B1*03:01L HLA-DPA1*03:01-B1*04:02L HLA-DPA1*01:03-B1*04:02L HLA-DPA1*02:01-B1*13:01L
LPETTADIVVFDEIS

SEQ ID NO: 19763 - protein, 14 aa, Severe acute respiratory syndrome coronavirus 2
  REGION 1..14: note = Table B: HLA-DRB1*01:02L HLA-DPA1*01:03-B1*03:01L HLA-DPA1*02:01-B1*13:01L HLA-DRB1*15:03L
SMATNYDLSVVNAR

SEQ ID NO: 19764 - protein, 13 aa, Severe acute respiratory syndrome coronavirus 2
  REGION 1..13: note = Table B: HLA-DRB1*01:02L HLA-DPA1*01:03-B1*03:01L HLA-DPA1*02:01-B1*13:01L HLA-DRB1*15:03L
ATNYDLSVVNARL

SEQ ID NO: 19765 - protein, 12 aa, Severe acute respiratory syndrome coronavirus 2
  REGION 1..12: note = Table B: HLA-DRB1*01:02L HLA-DPA1*03:01-B1*105:01L HLA-DRB1*04:08L
NYDLSVVNARLR

SEQ ID NO: 19766 - protein, 12 aa, Severe acute respiratory syndrome coronavirus 2
  REGION 1..12: note = Table B: HLA-DRB1*01:02L HLA-DRB1*15:03L
YDLSVVNARLRA

SEQ ID NO: 19767 - protein, 12 aa, Severe acute respiratory syndrome coronavirus 2
  REGION 1..12: note = Table B: HLA-DRB1*01:02L HLA-DRB1*16:01L HLA-DRB1*04:08L HLA-DRB1*15:03L
DLSVVNARLRAK

SEQ ID NO: 19768 - protein, 12 aa, Severe acute respiratory syndrome coronavirus 2
  REGION 1..12: note = Table B: HLA-DRB1*01:02L HLA-DRB1*16:01L
LSVVNARLRAKH

SEQ ID NO: 19769 - protein, 12 aa, Severe acute respiratory syndrome coronavirus 2
  REGION 1..12: note = Table B: HLA-DRB1*01:02L HLA-DRB1*16:01L
SVVNARLRAKHY

SEQ ID NO: 19770 - protein, 13 aa, Severe acute respiratory syndrome coronavirus 2
  REGION 1..13: note = Table B: HLA-DRB1*01:02L HLA-DPA1*03:01-B1*04:02L HLA-DRB1*08:01L HLA-DRB1*12:01L
NARLRAKHYVYIG

SEQ ID NO: 19771 - protein, 14 aa, Severe acute respiratory syndrome coronavirus 2
  REGION 1..14: note = Table B: HLA-DRB1*01:02L HLA-DPA1*03:01-B1*04:02L HLA-DRB1*08:01L HLA-DRB1*12:01L HLA-DPA1*03:01-B1*105:01L
ARLRAKHYVYIGDP

SEQ ID NO: 19772 - protein, 12 aa, Severe acute respiratory syndrome coronavirus 2
  REGION 1..12: note = Table B: HLA-DRB1*01:02L HLA-DPA1*01:03-B1*03:01L HLA-DPA1*03:01-B1*105:01L
IGDPAQLPAPRT

SEQ ID NO: 19773 - protein, 15 aa, Severe acute respiratory syndrome coronavirus 2
  REGION 1..15: note = Table B: HLA-DRB1*01:02L
APRTLLTKGTLEPEY

SEQ ID NO: 19774 - protein, 14 aa, Severe acute respiratory syndrome coronavirus 2
  REGION 1..14: note = Table B: HLA-DRB1*01:02L HLA-DRB3*02:01L
TLLTKGTLEPEYFN

SEQ ID NO: 19775 - protein, 14 aa, Severe acute respiratory syndrome coronavirus 2
  REGION 1..14: note = Table B: HLA-DRB1*01:02L
RLMKTIGPDMFLGT

SEQ ID NO: 19776 - protein, 14 aa, Severe acute respiratory syndrome coronavirus 2
  REGION 1..14: note = Table B: HLA-DRB1*01:02L
LGTCRRCPAEIVDT

SEQ ID NO: 19777 - protein, 11 aa, Severe acute respiratory syndrome coronavirus 2
  REGION 1..11: note = Table B: HLA-DRB1*01:02L
VYDNKLKAHKD

SEQ ID NO: 19778 - protein, 14 aa, Severe acute respiratory syndrome coronavirus 2
  REGION 1..14: note = Table B: HLA-DRB1*01:02L
KLKAHKDKSAQCFK

SEQ ID NO: 19779 - protein, 15 aa, Severe acute respiratory syndrome coronavirus 2
  REGION 1..15: note = Table B: HLA-DRB1*01:02L HLA-DQA1*02:01-B1*03:03L
AHKDKSAQCFKMFYK

SEQ ID NO: 19780 - protein, 12 aa, Severe acute respiratory syndrome coronavirus 2
  REGION 1..12: note = Table B: HLA-DRB1*01:02L
AINRPQIGVVRE

SEQ ID NO: 19781 - protein, 12 aa, Severe acute respiratory syndrome coronavirus 2
  REGION 1..12: note = Table B: HLA-DRB1*01:02L HLA-DRB1*16:01L HLA-DRB1*15:03L
PQIGVVREFLTR

SEQ ID NO: 19782 - protein, 11 aa, Severe acute respiratory syndrome coronavirus 2
  REGION 1..11: note = Table B: HLA-DRB1*01:02L
FLTRNPAWRKA

SEQ ID NO: 19783 - protein, 14 aa, Severe acute respiratory syndrome coronavirus 2
  REGION 1..14: note = Table B: HLA-DRB1*01:02L HLA-DRB1*08:04L HLA-DRB3*02:01L HLA-DRB1*14:01L HLA-DRB1*04:10L HLA-DRB1*12:02L HLA-DPA1*02:01-B1*13:01L HLA-DRB1*14:54L HLA-DQA1*01:03-B1*06:01L HLA-DRB1*04:08L
LPTQTVDSSQGSEY

SEQ ID NO: 19784 - protein, 15 aa, Severe acute respiratory syndrome coronavirus 2
  REGION 1..15: note = Table B: HLA-DRB1*01:02L
AHSCNVNRFNVAITR

SEQ ID NO: 19785 - protein, 14 aa, Severe acute respiratory syndrome coronavirus 2
  REGION 1..14: note = Table B: HLA-DRB1*01:02L HLA-DPA1*01:03-B1*03:01L HLA-DRB1*12:01L HLA-DPA1*02:01-B1*13:01L HLA-DPA1*03:01-B1*105:01L HLA-DQA1*03:01-B1*03:02L HLA-DRB1*16:01L HLA-DRB1*04:08L HLA-DRB1*15:03L
AKVGILCIMSDRDL

SEQ ID NO: 19786 - protein, 13 aa, Severe acute respiratory syndrome coronavirus 2
  REGION 1..13: note = Table B: HLA-DRB1*01:02L
ILCIMSDRDLYDK

SEQ ID NO: 19787 - protein, 11 aa, Severe acute respiratory syndrome coronavirus 2
  REGION 1..11: note = Table B: HLA-DRB1*01:02L HLA-DPA1*01:03-B1*04:02L HLA-DRB1*12:01L HLA-DRB1*10:01L HLA-DQA1*01:03-B1*06:01L HLA-DRB1*08:03L
ATLQAENVTGL

SEQ ID NO: 19788 - protein, 14 aa, Severe acute respiratory syndrome coronavirus 2
  REGION 1..14: note = Table B: HLA-DRB1*01:02L HLA-DRB1*08:01L
QAENVTGLFKDCSK

SEQ ID NO: 19789 - protein, 14 aa, Severe acute respiratory syndrome coronavirus 2
  REGION 1..14: note = Table B: HLA-DRB1*01:02L
GLHPTQAPTHLSVD

SEQ ID NO: 19790 - protein, 10 aa, Severe acute respiratory syndrome coronavirus 2
  REGION 1..10: note = Table B: HLA-DRB1*01:02L HLA-DRB1*12:01L HLA-DRB1*15:03L
LISMMGFKMN

SEQ ID NO: 19791 - protein, 12 aa, Severe acute respiratory syndrome coronavirus 2
  REGION 1..12: note = Table B: HLA-DRB1*01:02L HLA-DRB1*12:01L HLA-DRB1*16:01L HLA-DQA1*01:03-B1*06:01L HLA-DQA1*02:01-B1*03:03L HLA-DRB1*15:03L
AIRHVRAWIGFD

SEQ ID NO: 19792 - protein, 13 aa, Severe acute respiratory syndrome coronavirus 2
  REGION 1..13: note = Table B: HLA-DRB1*01:02L HLA-DPA1*03:01-B1*04:02L HLA-DPA1*01:03-B1*04:02L HLA-DPA1*03:01-B1*105:01L HLA-DPA1*01:02-B1*04:01L HLA-DRB1*16:01L HLA-DRB1*04:08L
VRAWIGFDVEGCH

SEQ ID NO: 19793 - protein, 14 aa, Severe acute respiratory syndrome coronavirus 2
  REGION 1..14: note = Table B: HLA-DRB1*01:02L HLA-DRB1*04:08L HLA-DRB1*15:03L
AWIGFDVEGCHATR

SEQ ID NO: 19794 - protein, 13 aa, Severe acute respiratory syndrome coronavirus 2
  REGION 1..13: note = Table B: HLA-DRB1*01:02L HLA-DRB1*04:08L
GFDVEGCHATREA

SEQ ID NO: 19795 - protein, 14 aa, Severe acute respiratory syndrome coronavirus 2
  REGION 1..14: note = Table B: HLA-DRB1*01:02L
HATREAVGTNLPLQ

SEQ ID NO: 19796 - protein, 14 aa, Severe acute respiratory syndrome coronavirus 2
  REGION 1..14: note = Table B: HLA-DRB1*01:02L
EAVGTNLPLQLGFS

SEQ ID NO: 19797 - protein, 14 aa, Severe acute respiratory syndrome coronavirus 2
  REGION 1..14: note = Table B: HLA-DRB1*01:02L HLA-DPA1*01:03-B1*03:01L
TNLPLQLGFSTGVN

SEQ ID NO: 19798 - protein, 14 aa, Severe acute respiratory syndrome coronavirus 2
  REGION 1..14: note = Table B: HLA-DRB1*01:02L HLA-DRB1*04:08L
LGFSTGVNLVAVPT

SEQ ID NO: 19799 - protein, 12 aa, Severe acute respiratory syndrome coronavirus 2
  REGION 1..12: note = Table B: HLA-DRB1*01:02L HLA-DQA1*01:01-B1*05:01L HLA-DRB1*08:03L
YVDTPNNTDFSR

SEQ ID NO: 19800 - protein, 13 aa, Severe acute respiratory syndrome coronavirus 2
  REGION 1..13: note = Table B: HLA-DRB1*01:02L HLA-DRB1*08:04L HLA-DRB1*04:10L HLA-DRB1*12:01L HLA-DPA1*02:01-B1*13:01L HLA-DRB1*04:08L
FSRVSAKPPPGDQ

SEQ ID NO: 19801 - protein, 14 aa, Severe acute respiratory syndrome coronavirus 2
  REGION 1..14: note = Table B: HLA-DRB1*01:02L
SRVSAKPPPGDQFK

SEQ ID NO: 19802 - protein, 16 aa, Severe acute respiratory syndrome coronavirus 2
  REGION 1..16: note = Table B: HLA-DRB1*01:02L
KPPPGDQFKHLIPLMY

SEQ ID NO: 19803 - protein, 11 aa, Severe acute respiratory syndrome coronavirus 2
  REGION 1..11: note = Table B: HLA-DRB1*01:02L HLA-DRB1*12:01L
QFKHLIPLMYK

SEQ ID NO: 19804 - protein, 12 aa, Severe acute respiratory syndrome coronavirus 2
  REGION 1..12: note = Table B: HLA-DRB1*01:02L HLA-DPA1*03:01-B1*04:02L HLA-DPA1*03:01-B1*105:01L
LIPLMYKGLPWN

SEQ ID NO: 19805 - protein, 13 aa, Severe acute respiratory syndrome coronavirus 2
  REGION 1..13: note = Table B: HLA-DRB1*01:02L
LSDTLKNLSDRVV

SEQ ID NO: 19806 - protein, 12 aa, Severe acute respiratory syndrome coronavirus 2
  REGION 1..12: note = Table B: HLA-DRB1*01:02L
AHGFELTSMKYF

SEQ ID NO: 19807 - protein, 15 aa, Severe acute respiratory syndrome coronavirus 2
  REGION 1..15: note = Table B: HLA-DRB1*01:02L
VKIGPERTCCLCDRR

SEQ ID NO: 19808 - protein, 14 aa, Severe acute respiratory syndrome coronavirus 2
  REGION 1..14: note = Table B: HLA-DRB1*01:02L HLA-DPA1*02:01-B1*13:01L HLA-DQA1*05:05-B1*03:01L
DRRATCFSTASDTY

SEQ ID NO: 19809 - protein, 14 aa, Severe acute respiratory syndrome coronavirus 2
  REGION 1..14: note = Table B: HLA-DRB1*01:02L
WHHSIGFDYVYNPF

SEQ ID NO: 19810 - protein, 12 aa, Severe acute respiratory syndrome coronavirus 2
  REGION 1..12: note = Table B: HLA-DRB1*01:02L HLA-DQA1*05:05-B1*03:19L HLA-DRB1*04:10L HLA-DQA1*05:05-B1*03:01L
YNPFMIDVQQWG

SEQ ID NO: 19811 - protein, 14 aa, Severe acute respiratory syndrome coronavirus 2
  REGION 1..14: note = Table B: HLA-DRB1*01:02L HLA-DPA1*03:01-B1*105:01L
HDLYCQVHGNAHVA

SEQ ID NO: 19812 - protein, 14 aa, Severe acute respiratory syndrome coronavirus 2
  REGION 1..14: note = Table B: HLA-DRB1*01:02L
DLYCQVHGNAHVAS

SEQ ID NO: 19813 - protein, 14 aa, Severe acute respiratory syndrome coronavirus 2
  REGION 1..14: note = Table B: HLA-DRB1*01:02L HLA-DRB1*08:01L HLA-DPA1*03:01-B1*105:01L
LAVHECFVKRVDWT

SEQ ID NO: 19814 - protein, 12 aa, Severe acute respiratory syndrome coronavirus 2
  REGION 1..12: note = Table B: HLA-DRB1*01:02L
TIEYPIIGDELK

SEQ ID NO: 19815 - protein, 13 aa, Severe acute respiratory syndrome coronavirus 2
  REGION 1..13: note = Table B: HLA-DRB1*01:02L HLA-DPA1*01:03-B1*03:01L
IEYPIIGDELKIN

SEQ ID NO: 19816 - protein, 13 aa, Severe acute respiratory syndrome coronavirus 2
  REGION 1..13: note = Table B: HLA-DRB1*01:02L
IGDELKINAACRK

SEQ ID NO: 19817 - protein, 12 aa, Severe acute respiratory syndrome coronavirus 2
  REGION 1..12: note = Table B: HLA-DRB1*01:02L HLA-DRB1*14:01L HLA-DRB1*12:01L HLA-DRB1*16:01L HLA-DRB1*15:03L
ELKINAACRKVQ

SEQ ID NO: 19818 - protein, 14 aa, Severe acute respiratory syndrome coronavirus 2
  REGION 1..14: note = Table B: HLA-DRB1*01:02L
RKVQHMVVKAALLA

SEQ ID NO: 19819 - protein, 14 aa, Severe acute respiratory syndrome coronavirus 2
  REGION 1..14: note = Table B: HLA-DRB1*01:02L HLA-DPA1*02:01-B1*13:01L
KVQHMVVKAALLAD

SEQ ID NO: 19820 - protein, 12 aa, Severe acute respiratory syndrome coronavirus 2
  REGION 1..12: note = Table B: HLA-DRB1*01:02L HLA-DRB1*08:01L
HMVVKAALLADK

SEQ ID NO: 19821 - protein, 12 aa, Severe acute respiratory syndrome coronavirus 2
  REGION 1..12: note = Table B: HLA-DRB1*01:02L HLA-DRB1*12:01L
ALLADKFPVLHD

SEQ ID NO: 19822 - protein, 13 aa, Severe acute respiratory syndrome coronavirus 2
  REGION 1..13: note = Table B: HLA-DRB1*01:02L
DKFPVLHDIGNPK

SEQ ID NO: 19823 - protein, 12 aa, Severe acute respiratory syndrome coronavirus 2
  REGION 1..12: note = Table B: HLA-DRB1*01:02L HLA-DRB1*04:08L
PVLHDIGNPKAI

SEQ ID NO: 19824 - protein, 13 aa, Severe acute respiratory syndrome coronavirus 2
  REGION 1..13: note = Table B: HLA-DRB1*01:02L
GNPKAIKCVPQAD

SEQ ID NO: 19825 - protein, 14 aa, Severe acute respiratory syndrome coronavirus 2
  REGION 1..14: note = Table B: HLA-DRB1*01:02L HLA-DPA1*02:01-B1*13:01L HLA-DRB1*15:03L
KAIKCVPQADVEWK

SEQ ID NO: 19826 - protein, 12 aa, Severe acute respiratory syndrome coronavirus 2
  REGION 1..12: note = Table B: HLA-DRB1*01:02L HLA-DQA1*01-B1*05L HLA-DRB1*16:01L HLA-DRB1*15:03L
VEWKFYDAQPCS

SEQ ID NO: 19827 - protein, 11 aa, Severe acute respiratory syndrome coronavirus 2
  REGION 1..11: note = Table B: HLA-DRB1*01:02L HLA-DQA1*01-B1*05L HLA-DRB1*16:01L HLA-DRB1*15:03L
WKFYDAQPCSD

SEQ ID NO: 19828 - protein, 11 aa, Severe acute respiratory syndrome coronavirus 2
  REGION 1..11: note = Table B: HLA-DRB1*01:02L HLA-DRB1*08:01L HLA-DRB1*12:01L HLA-DPA1*01:02-B1*04:01L
KFYDAQPCSDK

SEQ ID NO: 19829 - protein, 14 aa, Severe acute respiratory syndrome coronavirus 2
  REGION 1..14: note = Table B: HLA-DRB1*01:02L
YDAQPCSDKAYKIE

SEQ ID NO: 19830 - protein, 13 aa, Severe acute respiratory syndrome coronavirus 2
  REGION 1..13: note = Table B: HLA-DRB1*01:02L HLA-DRB1*08:04L HLA-DRB1*04:08L
KAYKIEELFYSYA

SEQ ID NO: 19831 - protein, 13 aa, Severe acute respiratory syndrome coronavirus 2
  REGION 1..13: note = Table B: HLA-DRB1*01:02L HLA-DRB1*08:04L HLA-DRB1*14:01L HLA-DQA1*05:01-B1*02:01L HLA-DQA1*03:01-B1*03:02L
LFWNCNVDRYPAN

SEQ ID NO: 19832 - protein, 14 aa, Severe acute respiratory syndrome coronavirus 2
  REGION 1..14: note = Table B: HLA-DRB1*01:02L
RYPANSIVCRFDTR

SEQ ID NO: 19833 - protein, 15 aa, Severe acute respiratory syndrome coronavirus 2
  REGION 1..15: note = Table B: HLA-DRB1*01:02L HLA-DRB1*14:01L HLA-DRB1*12:01L HLA-DRB1*16:01L
YPANSIVCRFDTRVL

SEQ ID NO: 19834 - protein, 12 aa, Severe acute respiratory syndrome coronavirus 2
  REGION 1..12: note = Table B: HLA-DRB1*01:02L HLA-DRB1*12:01L HLA-DPA1*02:01-B1*13:01L
IVCRFDTRVLSN

SEQ ID NO: 19835 - protein, 12 aa, Severe acute respiratory syndrome coronavirus 2
  REGION 1..12: note = Table B: HLA-DRB1*01:02L HLA-DRB1*16:01L
KHAFHTPAFDKS

SEQ ID NO: 19836 - protein, 12 aa, Severe acute respiratory syndrome coronavirus 2
  REGION 1..12: note = Table B: HLA-DRB1*01:02L HLA-DRB1*08:01L HLA-DRB1*12:01L HLA-DPA1*01:03-B1*02:01L
AFDKSAFVNLKQ

SEQ ID NO: 19837 - protein, 13 aa, Severe acute respiratory syndrome coronavirus 2
  REGION 1..13: note = Table B: HLA-DRB1*01:02L
VNLKQLPFFYYSD

SEQ ID NO: 19838 - protein, 14 aa, Severe acute respiratory syndrome coronavirus 2
  REGION 1..14: note = Table B: HLA-DRB1*01:02L
KQLPFFYYSDSPCE

SEQ ID NO: 19839 - protein, 16 aa, Severe acute respiratory syndrome coronavirus 2
  REGION 1..16: note = Table B: HLA-DRB1*01:02L
DSPCESHGKQVVSDID

SEQ ID NO: 19840 - protein, 11 aa, Severe acute respiratory syndrome coronavirus 2
  REGION 1..11: note = Table B: HLA-DRB1*01:02L HLA-DRB1*12:01L HLA-DRB1*16:01L HLA-DRB1*15:03L
IDYVPLKSATC

SEQ ID NO: 19841 - protein, 12 aa, Severe acute respiratory syndrome coronavirus 2
  REGION 1..12: note = Table B: HLA-DRB1*01:02L HLA-DPA1*02:01-B1*13:01L HLA-DPA1*03:01-B1*105:01L HLA-DRB1*04:08L
NEYRLYLDAYNM

SEQ ID NO: 19842 - protein, 12 aa, Severe acute respiratory syndrome coronavirus 2
  REGION 1..12: note = Table B: HLA-DRB1*01:02L HLA-DPA1*01:03-B1*04:02L
EYRLYLDAYNMM

SEQ ID NO: 19843 - protein, 14 aa, Severe acute respiratory syndrome coronavirus 2
  REGION 1..14: note = Table B: HLA-DRB1*01:02L HLA-DPA1*01:03-B1*03:01L HLA-DQA1*01-B1*05L HLA-DQA1*05:01-B1*02:01L HLA-DPA1*01:03-B1*04:01L HLA-DPA1*01:03-B1*04:02L HLA-DRB1*12:01L HLA-DRB1*16:01L
ISAGFSLWVYKQFD

SEQ ID NO: 19844 - protein, 12 aa, Severe acute respiratory syndrome coronavirus 2
  REGION 1..12: note = Table B: HLA-DRB1*01:02L HLA-DRB1*08:04L HLA-DRB1*08:01L HLA-DRB1*14:54L HLA-DQA1*05:05-B1*03:01L
NVAFNVVNKGHF

SEQ ID NO: 19845 - protein, 13 aa, Severe acute respiratory syndrome coronavirus 2
  REGION 1..13: note = Table B: HLA-DRB1*01:02L HLA-DPA1*03:01-B1*105:01L HLA-DRB1*15:03L
FNVVNKGHFDGQQ

SEQ ID NO: 19846 - protein, 16 aa, Severe acute respiratory syndrome coronavirus 2
  REGION 1..16: note = Table B: HLA-DRB1*01:02L HLA-DPA1*02:01-B1*13:01L
NVVNKGHFDGQQGEVP

SEQ ID NO: 19847 - protein, 14 aa, Severe acute respiratory syndrome coronavirus 2
  REGION 1..14: note = Table B: HLA-DRB1*01:02L HLA-DRB1*12:01L
TKVDGVDVELFENK

SEQ ID NO: 19848 - protein, 14 aa, Severe acute respiratory syndrome coronavirus 2
  REGION 1..14: note = Table B: HLA-DRB1*01:02L HLA-DRB1*08:04L HLA-DRB1*08:01L HLA-DRB1*04:10L HLA-DPA1*02:01-B1*13:01L HLA-DPA1*01:03-B1*02:01L
VDGVDVELFENKTT

SEQ ID NO: 19849 - protein, 13 aa, Severe acute respiratory syndrome coronavirus 2
  REGION 1..13: note = Table B: HLA-DRB1*01:02L HLA-DQA1*01:01-B1*05:01L
ENKTTLPVNVAFE

SEQ ID NO: 19850 - protein, 13 aa, Severe acute respiratory syndrome coronavirus 2
  REGION 1..13: note = Table B: HLA-DRB1*01:02L HLA-DQA1*03:01-B1*03:02L HLA-DPA1*01:02-B1*04:01L HLA-DRB1*04:08L HLA-DQA1*02:01-B1*03:03L
LPVNVAFELWAKR

SEQ ID NO: 19851 - protein, 11 aa, Severe acute respiratory syndrome coronavirus 2
  REGION 1..11: note = Table B: HLA-DRB1*01:02L HLA-DQA1*05:01-B1*02:01L HLA-DRB1*12:01L
NIKPVPEVKIL

SEQ ID NO: 19852 - protein, 14 aa, Severe acute respiratory syndrome coronavirus 2
  REGION 1..14: note = Table B: HLA-DRB1*01:02L HLA-DPA1*03:01-B1*105:01L HLA-DQA1*01:03-B1*06:01L
NLGVDIAANTVIWD

SEQ ID NO: 19853 - protein, 14 aa, Severe acute respiratory syndrome coronavirus 2
  REGION 1..14: note = Table B: HLA-DRB1*01:02L
AANTVIWDYKRDAP

SEQ ID NO: 19854 - protein, 14 aa, Severe acute respiratory syndrome coronavirus 2
  REGION 1..14: note = Table B: HLA-DRB1*01:02L
TIGVCSMTDIAKKP

SEQ ID NO: 19855 - protein, 14 aa, Severe acute respiratory syndrome coronavirus 2
  REGION 1..14: note = Table B: HLA-DRB1*01:02L
GRVDGQVDLFRNAR

SEQ ID NO: 19856 - protein, 12 aa, Severe acute respiratory syndrome coronavirus 2
  REGION 1..12: note = Table B: HLA-DRB1*01:02L
LFRNARNGVLIT

SEQ ID NO: 19857 - protein, 14 aa, Severe acute respiratory syndrome coronavirus 2
  REGION 1..14: note = Table B: HLA-DRB1*01:02L HLA-DPA1*01:03-B1*03:01L HLA-DPA1*02:01-B1*13:01L
RNARNGVLITEGSV

SEQ ID NO: 19858 - protein, 12 aa, Severe acute respiratory syndrome coronavirus 2
  REGION 1..12: note = Table B: HLA-DRB1*01:02L HLA-DRB1*04:08L
VLITEGSVKGLQ

SEQ ID NO: 19859 - protein, 12 aa, Severe acute respiratory syndrome coronavirus 2
  REGION 1..12: note = Table B: HLA-DRB1*01:02L HLA-DQA1*01:01-B1*05:01L HLA-DQA1*05:05-B1*03:19L HLA-DQA1*05:01-B1*02:01L HLA-DRB1*12:01L HLA-DPA1*03:01-B1*105:01L HLA-DRB1*14:17L
LNGVTLIGEAVK

SEQ ID NO: 19860 - protein, 12 aa, Severe acute respiratory syndrome coronavirus 2
  REGION 1..12: note = Table B: HLA-DRB1*01:02L HLA-DRB1*04:08L
EAVKTQFNYYKK

SEQ ID NO: 19861 - protein, 12 aa, Severe acute respiratory syndrome coronavirus 2
  REGION 1..12: note = Table B: HLA-DRB1*01:02L
KTQFNYYKKVDG

SEQ ID NO: 19862 - protein, 14 aa, Severe acute respiratory syndrome coronavirus 2
  REGION 1..14: note = Table B: HLA-DRB1*01:02L HLA-DRB1*11:04L HLA-DRB1*11:01L HLA-DRB1*12:01L
TYFTQSRNLQEFKP

SEQ ID NO: 19863 - protein, 14 aa, Severe acute respiratory syndrome coronavirus 2
  REGION 1..14: note = Table B: HLA-DRB1*01:02L HLA-DQA1*05:01-B1*02:01L HLA-DPA1*01:03-B1*04:02L HLA-DRB1*12:01L HLA-DPA1*02:01-B1*13:01L HLA-DRB1*16:01L HLA-DQA1*01:03-B1*06:01L
KPRSQMEIDFLELA

SEQ ID NO: 19864 - protein, 11 aa, Severe acute respiratory syndrome coronavirus 2
  REGION 1..11: note = Table B: HLA-DRB1*01:02L
LAMDEFIERYK

SEQ ID NO: 19865 - protein, 13 aa, Severe acute respiratory syndrome coronavirus 2
  REGION 1..13: note = Table B: HLA-DRB1*01:02L HLA-DRB1*08:01L HLA-DRB1*12:01L
KLEGYAFEHIVYG

SEQ ID NO: 19866 - protein, 12 aa, Severe acute respiratory syndrome coronavirus 2
  REGION 1..12: note = Table B: HLA-DRB1*01:02L HLA-DRB1*04:08L
GYAFEHIVYGDF

SEQ ID NO: 19867 - protein, 13 aa, Severe acute respiratory syndrome coronavirus 2
  REGION 1..13: note = Table B: HLA-DRB1*01:02L HLA-DRB1*08:01L
YAFEHIVYGDFSH

SEQ ID NO: 19868 - protein, 12 aa, Severe acute respiratory syndrome coronavirus 2
  REGION 1..12: note = Table B: HLA-DRB1*01:02L HLA-DRB1*12:01L HLA-DRB1*15:03L
GLHLLIGLAKRF

SEQ ID NO: 19869 - protein, 12 aa, Severe acute respiratory syndrome coronavirus 2
  REGION 1..12: note = Table B: HLA-DRB1*01:02L HLA-DRB1*15:03L
LHLLIGLAKRFK

SEQ ID NO: 19870 - protein, 14 aa, Severe acute respiratory syndrome coronavirus 2
  REGION 1..14: note = Table B: HLA-DRB1*01:02L HLA-DRB1*08:01L HLA-DRB1*16:01L HLA-DRB1*15:03L
HLLIGLAKRFKESP

SEQ ID NO: 19871 - protein, 12 aa, Severe acute respiratory syndrome coronavirus 2
  REGION 1..12: note = Table B: HLA-DRB1*01:02L HLA-DRB1*12:01L HLA-DRB1*15:03L
GLAKRFKESPFE

SEQ ID NO: 19872 - protein, 12 aa, Severe acute respiratory syndrome coronavirus 2
  REGION 1..12: note = Table B: HLA-DRB1*01:02L HLA-DPA1*01:03-B1*03:01L HLA-DPA1*03:01-B1*04:02L HLA-DPA1*01:03-B1*04:01L HLA-DRB1*04:10L HLA-DRB1*12:01L HLA-DPA1*02:01-B1*13:01L HLA-DRB1*08:03L HLA-DRB1*15:03L
LDDFVEIIKSQD

SEQ ID NO: 19873 - protein, 13 aa, Severe acute respiratory syndrome coronavirus 2
  REGION 1..13: note = Table B: HLA-DRB1*01:02L
QDLSVVSKVVKVT

SEQ ID NO: 19874 - protein, 14 aa, Severe acute respiratory syndrome coronavirus 2
  REGION 1..14: note = Table B: HLA-DRB1*01:02L HLA-DPA1*03:01-B1*105:01L
SVVSKVVKVTIDYT

SEQ ID NO: 19875 - protein, 14 aa, Severe acute respiratory syndrome coronavirus 2
  REGION 1..14: note = Table B: HLA-DRB1*01:02L
KDGHVETFYPKLQS

SEQ ID NO: 19876 - protein, 14 aa, Severe acute respiratory syndrome coronavirus 2
  REGION 1..14: note = Table B: HLA-DRB1*01:02L HLA-DRB1*08:01L HLA-DRB1*12:01L HLA-DRB1*04:08L
DGHVETFYPKLQSS

SEQ ID NO: 19877 - protein, 14 aa, Severe acute respiratory syndrome coronavirus 2
  REGION 1..14: note = Table B: HLA-DRB1*01:02L HLA-DRB1*15:03L
HVETFYPKLQSSQA

SEQ ID NO: 19878 - protein, 14 aa, Severe acute respiratory syndrome coronavirus 2
  REGION 1..14: note = Table B: HLA-DRB1*01:02L
QPGVAMPNLYKMQR

SEQ ID NO: 19879 - protein, 14 aa, Severe acute respiratory syndrome coronavirus 2
  REGION 1..14: note = Table B: HLA-DRB1*01:02L
KMQRMLLEKCDLQN

SEQ ID NO: 19880 - protein, 12 aa, Severe acute respiratory syndrome coronavirus 2
  REGION 1..12: note = Table B: HLA-DRB1*01:02L HLA-DRB3*02:01L HLA-DPA1*01:03-B1*03:01L HLA-DPA1*03:01-B1*04:02L HLA-DPA1*01:03-B1*04:01L HLA-DQA1*05:05-B1*03:116L HLA-DPA1*01:03-B1*04:02L HLA-DPA1*02:01-B1*13:01L
  REGION 1..12: note = CONT. FROM ABOVE: HLA-DRB1*15:03L
YGDSATLPKGIM

SEQ ID NO: 19881 - protein, 15 aa, Severe acute respiratory syndrome coronavirus 2
  REGION 1..15: note = Table B: HLA-DRB1*01:02L
DSATLPKGIMMNVAK

SEQ ID NO: 19882 - protein, 14 aa, Severe acute respiratory syndrome coronavirus 2
  REGION 1..14: note = Table B: HLA-DRB1*01:02L HLA-DPA1*01:03-B1*04:02L HLA-DRB1*15:03L
AKYTQLCQYLNTLT

SEQ ID NO: 19883 - protein, 14 aa, Severe acute respiratory syndrome coronavirus 2
  REGION 1..14: note = Table B: HLA-DRB1*01:02L HLA-DRB1*12:01L HLA-DRB1*16:01L HLA-DRB1*15:03L
TLTLAVPYNMRVIH

SEQ ID NO: 19884 - protein, 14 aa, Severe acute respiratory syndrome coronavirus 2
  REGION 1..14: note = Table B: HLA-DRB1*01:02L HLA-DQA1*05:05-B1*03:116L HLA-DRB1*04:08L
GAGSDKGVAPGTAV

SEQ ID NO: 19885 - protein, 15 aa, Severe acute respiratory syndrome coronavirus 2
  REGION 1..15: note = Table B: HLA-DRB1*01:02L
APGTAVLRQWLPTGT

SEQ ID NO: 19886 - protein, 14 aa, Severe acute respiratory syndrome coronavirus 2
  REGION 1..14: note = Table B: HLA-DRB1*01:02L HLA-DRB1*14:01L HLA-DQA1*05:05-B1*03:19L HLA-DPA1*03:01-B1*105:01L HLA-DRB1*15:03L
DSTLIGDCATVHTA

SEQ ID NO: 19887 - protein, 14 aa, Severe acute respiratory syndrome coronavirus 2
  REGION 1..14: note = Table B: HLA-DRB1*01:02L HLA-DRB1*04:08L
TLIGDCATVHTANK

SEQ ID NO: 19888 - protein, 14 aa, Severe acute respiratory syndrome coronavirus 2
  REGION 1..14: note = Table B: HLA-DRB1*01:02L
IGDCATVHTANKWD

SEQ ID NO: 19889 - protein, 15 aa, Severe acute respiratory syndrome coronavirus 2
  REGION 1..15: note = Table B: HLA-DRB1*01:02L
ATVHTANKWDLIISD

SEQ ID NO: 19890 - protein, 14 aa, Severe acute respiratory syndrome coronavirus 2
  REGION 1..14: note = Table B: HLA-DRB1*01:02L HLA-DRB1*12:01L HLA-DRB1*04:08L HLA-DRB1*15:03L
NKWDLIISDMYDPK

SEQ ID NO: 19891 - protein, 12 aa, Severe acute respiratory syndrome coronavirus 2
  REGION 1..12: note = Table B: HLA-DRB1*01:02L HLA-DRB1*15:03L
FFTYICGFIQQK

SEQ ID NO: 19892 - protein, 13 aa, Severe acute respiratory syndrome coronavirus 2
  REGION 1..13: note = Table B: HLA-DRB1*01:02L HLA-DQA1*05:05-B1*03:01L
FTYICGFIQQKLA

SEQ ID NO: 19893 - protein, 13 aa, Severe acute respiratory syndrome coronavirus 2
  REGION 1..13: note = Table B: HLA-DRB1*01:02L HLA-DPA1*01:03-B1*03:01L HLA-DRB1*12:01L
FIQQKLALGGSVA

SEQ ID NO: 19894 - protein, 13 aa, Severe acute respiratory syndrome coronavirus 2
  REGION 1..13: note = Table B: HLA-DRB1*01:02L HLA-DRB1*08:04L HLA-DRB1*08:01L HLA-DRB1*04:08L
VAIKITEHSWNAD

SEQ ID NO: 19895 - protein, 13 aa, Severe acute respiratory syndrome coronavirus 2
  REGION 1..13: note = Table B: HLA-DRB1*01:02L
IKITEHSWNADLY

SEQ ID NO: 19896 - protein, 14 aa, Severe acute respiratory syndrome coronavirus 2
  REGION 1..14: note = Table B: HLA-DRB1*01:02L
HSWNADLYKLMGHF

SEQ ID NO: 19897 - protein, 12 aa, Severe acute respiratory syndrome coronavirus 2
  REGION 1..12: note = Table B: HLA-DRB1*01:02L HLA-DRB1*14:01L
ADLYKLMGHFAW

SEQ ID NO: 19898 - protein, 13 aa, Severe acute respiratory syndrome coronavirus 2
  REGION 1..13: note = Table B: HLA-DRB1*01:02L
DLYKLMGHFAWWT

SEQ ID NO: 19899 - protein, 14 aa, Severe acute respiratory syndrome coronavirus 2
  REGION 1..14: note = Table B: HLA-DRB1*01:02L HLA-DRB1*15:03L
AWWTAFVTNVNASS

SEQ ID NO: 19900 - protein, 13 aa, Severe acute respiratory syndrome coronavirus 2
  REGION 1..13: note = Table B: HLA-DRB1*01:02L HLA-DPA1*01:03-B1*03:01L
NVNASSSEAFLIG

SEQ ID NO: 19901 - protein, 14 aa, Severe acute respiratory syndrome coronavirus 2
  REGION 1..14: note = Table B: HLA-DRB1*01:02L HLA-DPA1*02:01-B1*13:01L HLA-DRB1*16:01L
KPREQIDGYVMHAN

SEQ ID NO: 19902 - protein, 14 aa, Severe acute respiratory syndrome coronavirus 2
  REGION 1..14: note = Table B: HLA-DRB1*01:02L HLA-DPA1*03:01-B1*04:02L HLA-DPA1*02:01-B1*13:01L HLA-DRB1*16:01L HLA-DRB1*15:03L
PIQLSSYSLFDMSK

SEQ ID NO: 19903 - protein, 13 aa, Severe acute respiratory syndrome coronavirus 2
  REGION 1..13: note = Table B: HLA-DRB1*01:02L HLA-DRB1*12:01L
LSSYSLFDMSKFP

SEQ ID NO: 19904 - protein, 12 aa, Severe acute respiratory syndrome coronavirus 2
  REGION 1..12: note = Table B: HLA-DRB1*01:02L
FDMSKFPLKLRG

SEQ ID NO: 19905 - protein, 12 aa, Severe acute respiratory syndrome coronavirus 2
  REGION 1..12: note = Table B: HLA-DRB1*01:02L
KLRGTAVMSLKE

SEQ ID NO: 19906 - protein, 12 aa, Severe acute respiratory syndrome coronavirus 2
  REGION 1..12: note = Table B: HLA-DRB1*01:02L
LSLLSKGRLIIR

SEQ ID NO: 19907 - protein, 13 aa, Severe acute respiratory syndrome coronavirus 2
  REGION 1..13: note = Table B: HLA-DRB1*01:02L HLA-DRB1*08:01L
LSKGRLIIRENNR

SEQ ID NO: 19908 - protein, 12 aa, Severe acute respiratory syndrome coronavirus 2
  REGION 1..12: note = Table B: HLA-DRB1*01:02L HLA-DRB1*12:01L HLA-DRB1*15:03L
RLIIRENNRVVI

SEQ ID NO: 19909 - protein, 11 aa, Severe acute respiratory syndrome coronavirus 2
  REGION 1..11: note = Table B: HLA-DRB1*01:02L
LLPLVSSQCVN

SEQ ID NO: 19910 - protein, 15 aa, Severe acute respiratory syndrome coronavirus 2
  REGION 1..15: note = Table B: HLA-DRB1*01:02L
RTQLPPAYTNSFTRG

SEQ ID NO: 19911 - protein, 15 aa, Severe acute respiratory syndrome coronavirus 2
  REGION 1..15: note = Table B: HLA-DRB1*01:02L
PAYTNSFTRGVYYPD

SEQ ID NO: 19912 - protein, 12 aa, Severe acute respiratory syndrome coronavirus 2
  REGION 1..12: note = Table B: HLA-DRB1*01:02L HLA-DPA1*03:01-B1*04:02L HLA-DRB1*08:01L HLA-DPA1*01:03-B1*04:02L HLA-DRB1*12:01L HLA-DQA1*03:01-B1*03:02L HLA-DRB1*16:01L HLA-DRB1*15:03L
KVFRSSVLHSTQ

SEQ ID NO: 19913 - protein, 13 aa, Severe acute respiratory syndrome coronavirus 2
  REGION 1..13: note = Table B: HLA-DRB1*01:02L
SVLHSTQDLFLPF

SEQ ID NO: 19914 - protein, 12 aa, Severe acute respiratory syndrome coronavirus 2
  REGION 1..12: note = Table B: HLA-DRB1*01:02L HLA-DRB1*12:01L HLA-DQA1*02:01-B1*03:03L
SNVTWFHAIHVS

SEQ ID NO: 19915 - protein, 12 aa, Severe acute respiratory syndrome coronavirus 2
  REGION 1..12: note = Table B: HLA-DRB1*01:02L HLA-DRB1*04:08L
WFHAIHVSGTNG

SEQ ID NO: 19916 - protein, 16 aa, Severe acute respiratory syndrome coronavirus 2
  REGION 1..16: note = Table B: HLA-DRB1*01:02L HLA-DQA1*01:03-B1*06:01L
IHVSGTNGTKRFDNPV

SEQ ID NO: 19917 - protein, 12 aa, Severe acute respiratory syndrome coronavirus 2
  REGION 1..12: note = Table B: HLA-DRB1*01:02L HLA-DPA1*02:01-B1*13:01L HLA-DRB1*04:08L
RFDNPVLPFNDG

SEQ ID NO: 19918 - protein, 11 aa, Severe acute respiratory syndrome coronavirus 2
  REGION 1..11: note = Table B: HLA-DRB1*01:02L HLA-DQA1*05:05-B1*03:116L
PVLPFNDGVYF

SEQ ID NO: 19919 - protein, 13 aa, Severe acute respiratory syndrome coronavirus 2
  REGION 1..13: note = Table B: HLA-DRB1*01:02L
RGWIFGTTLDSKT

SEQ ID NO: 19920 - protein, 13 aa, Severe acute respiratory syndrome coronavirus 2
  REGION 1..13: note = Table B: HLA-DRB1*01:02L HLA-DPA1*02:01-B1*13:01L HLA-DRB1*04:08L HLA-DQA1*02:01-B1*03:03L
HKNNKSWMESEFR

SEQ ID NO: 19921 - protein, 13 aa, Severe acute respiratory syndrome coronavirus 2
  REGION 1..13: note = Table B: HLA-DRB1*01:02L HLA-DRB1*14:01L HLA-DRB1*08:01L
NNKSWMESEFRVY

SEQ ID NO: 19922 - protein, 13 aa, Severe acute respiratory syndrome coronavirus 2
  REGION 1..13: note = Table B: HLA-DRB1*01:02L HLA-DPA1*01:03-B1*02:01L
NKSWMESEFRVYS

SEQ ID NO: 19923 - protein, 14 aa, Severe acute respiratory syndrome coronavirus 2
  REGION 1..14: note = Table B: HLA-DRB1*01:02L HLA-DRB1*08:04L HLA-DRB1*08:01L HLA-DPA1*01:03-B1*02:01L HLA-DQA1*05:05-B1*03:01L
SWMESEFRVYSSAN

SEQ ID NO: 19924 - protein, 12 aa, Severe acute respiratory syndrome coronavirus 2
  REGION 1..12: note = Table B: HLA-DRB1*01:02L HLA-DPA1*01:03-B1*03:01L
TFEYVSQPFLMD

SEQ ID NO: 19925 - protein, 11 aa, Severe acute respiratory syndrome coronavirus 2
  REGION 1..11: note = Table B: HLA-DRB1*01:02L
NFKNLREFVFK

SEQ ID NO: 19926 - protein, 13 aa, Severe acute respiratory syndrome coronavirus 2
  REGION 1..13: note = Table B: HLA-DRB1*01:02L HLA-DRB1*14:01L
NLREFVFKNIDGY

SEQ ID NO: 19927 - protein, 13 aa, Severe acute respiratory syndrome coronavirus 2
  REGION 1..13: note = Table B: HLA-DRB1*01:02L HLA-DRB1*14:01L HLA-DRB1*11:04L HLA-DRB1*08:01L HLA-DRB3*01:01L
KNIDGYFKIYSKH

SEQ ID NO: 19928 - protein, 12 aa, Severe acute respiratory syndrome coronavirus 2
  REGION 1..12: note = Table B: HLA-DRB1*01:02L HLA-DRB1*08:04L HLA-DRB1*08:77L HLA-DRB3*02:01L HLA-DRB1*03:01L HLA-DRB1*12:02L
INLVRDLPQGFS

SEQ ID NO: 19929 - protein, 11 aa, Severe acute respiratory syndrome coronavirus 2
  REGION 1..11: note = Table B: HLA-DRB1*01:02L
RFQTLLALHRS

SEQ ID NO: 19930 - protein, 12 aa, Severe acute respiratory syndrome coronavirus 2
  REGION 1..12: note = Table B: HLA-DRB1*01:02L HLA-DRB1*08:04L HLA-DRB1*12:01L HLA-DRB1*15:03L
FQTLLALHRSYL

SEQ ID NO: 19931 - protein, 14 aa, Severe acute respiratory syndrome coronavirus 2
  REGION 1..14: note = Table B: HLA-DRB1*01:02L HLA-DRB1*04:08L
RSYLTPGDSSSGWT

SEQ ID NO: 19932 - protein, 14 aa, Severe acute respiratory syndrome coronavirus 2
  REGION 1..14: note = Table B: HLA-DRB1*01:02L HLA-DRB1*12:01L HLA-DPA1*03:01-B1*105:01L HLA-DRB1*04:08L HLA-DRB1*15:03L
YLQPRTFLLKYNEN

SEQ ID NO: 19933 - protein, 14 aa, Severe acute respiratory syndrome coronavirus 2
  REGION 1..14: note = Table B: HLA-DRB1*01:02L HLA-DPA1*02:01-B1*13:01L
LQPRTFLLKYNENG

SEQ ID NO: 19934 - protein, 14 aa, Severe acute respiratory syndrome coronavirus 2
  REGION 1..14: note = Table B: HLA-DRB1*01:02L
QPRTFLLKYNENGT

SEQ ID NO: 19935 - protein, 15 aa, Severe acute respiratory syndrome coronavirus 2
  REGION 1..15: note = Table B: HLA-DRB1*01:02L
DCALDPLSETKCTLK

SEQ ID NO: 19936 - protein, 14 aa, Severe acute respiratory syndrome coronavirus 2
  REGION 1..14: note = Table B: HLA-DRB1*01:02L
ALDPLSETKCTLKS

SEQ ID NO: 19937 - protein, 14 aa, Severe acute respiratory syndrome coronavirus 2
  REGION 1..14: note = Table B: HLA-DRB1*01:02L HLA-DRB1*15:03L
TNLCPFGEVFNATR

SEQ ID NO: 19938 - protein, 11 aa, Severe acute respiratory syndrome coronavirus 2
  REGION 1..11: note = Table B: HLA-DRB1*01:02L HLA-DRB1*08:04L HLA-DRB1*14:01L HLA-DRB1*11:04L HLA-DRB1*08:01L HLA-DRB1*11:01L HLA-DPA1*01:03-B1*02:01L
FNATRFASVYA

SEQ ID NO: 19939 - protein, 11 aa, Severe acute respiratory syndrome coronavirus 2
  REGION 1..11: note = Table B: HLA-DRB1*01:02L HLA-DRB1*08:01L HLA-DPA1*01:02-B1*04:01L HLA-DRB1*16:01L HLA-DRB1*04:08L HLA-DQA1*02:01-B1*03:03L
FASVYAWNRKR

SEQ ID NO: 19940 - protein, 12 aa, Severe acute respiratory syndrome coronavirus 2
  REGION 1..12: note = Table B: HLA-DRB1*01:02L HLA-DPA1*02:01-B1*13:01L
RKRISNCVADYS

SEQ ID NO: 19941 - protein, 13 aa, Severe acute respiratory syndrome coronavirus 2
  REGION 1..13: note = Table B: HLA-DRB1*01:02L
YADSFVIRGDEVR

SEQ ID NO: 19942 - protein, 14 aa, Severe acute respiratory syndrome coronavirus 2
  REGION 1..14: note = Table B: HLA-DRB1*01:02L HLA-DRB1*15:03L
AWNSNNLDSKVGGN

SEQ ID NO: 19943 - protein, 11 aa, Severe acute respiratory syndrome coronavirus 2
  REGION 1..11: note = Table B: HLA-DRB1*01:02L HLA-DQA1*01:01-B1*05:01L
NLDSKVGGNYN

SEQ ID NO: 19944 - protein, 12 aa, Severe acute respiratory syndrome coronavirus 2
  REGION 1..12: note = Table B: HLA-DRB1*01:02L HLA-DRB1*14:01L HLA-DRB1*08:01L HLA-DRB1*12:01L HLA-DRB1*16:01L HLA-DRB1*04:08L HLA-DRB1*15:03L
YRLFRKSNLKPF

SEQ ID NO: 19945 - protein, 12 aa, Severe acute respiratory syndrome coronavirus 2
  REGION 1..12: note = Table B: HLA-DRB1*01:02L HLA-DRB1*14:01L HLA-DRB1*08:01L HLA-DRB1*12:01L HLA-DPA1*01:02-B1*04:01L HLA-DRB1*16:01L HLA-DRB1*04:08L HLA-DRB1*15:03L
RLFRKSNLKPFE

SEQ ID NO: 19946 - protein, 14 aa, Severe acute respiratory syndrome coronavirus 2
  REGION 1..14: note = Table B: HLA-DRB1*01:02L HLA-DPA1*02:01-B1*13:01L
FRKSNLKPFERDIS

SEQ ID NO: 19947 - protein, 14 aa, Severe acute respiratory syndrome coronavirus 2
  REGION 1..14: note = Table B: HLA-DRB1*01:02L HLA-DPA1*01:03-B1*03:01L HLA-DRB1*08:01L
IYQAGSTPCNGVEG

SEQ ID NO: 19948 - protein, 14 aa, Severe acute respiratory syndrome coronavirus 2
  REGION 1..14: note = Table B: HLA-DRB1*01:02L
FNCYFPLQSYGFQP

SEQ ID NO: 19949 - protein, 12 aa, Severe acute respiratory syndrome coronavirus 2
  REGION 1..12: note = Table B: HLA-DRB1*01:02L HLA-DRB3*02:01L
SYGFQPTNGVGY

SEQ ID NO: 19950 - protein, 12 aa, Severe acute respiratory syndrome coronavirus 2
  REGION 1..12: note = Table B: HLA-DRB1*01:02L HLA-DRB1*07:01L
GFQPTNGVGYQP

SEQ ID NO: 19951 - protein, 15 aa, Severe acute respiratory syndrome coronavirus 2
  REGION 1..15: note = Table B: HLA-DRB1*01:02L HLA-DPA1*03:01-B1*04:02L HLA-DRB1*04:08L
QPTNGVGYQPYRVVV

SEQ ID NO: 19952 - protein, 11 aa, Severe acute respiratory syndrome coronavirus 2
  REGION 1..11: note = Table B: HLA-DRB1*01:02L HLA-DRB3*02:01L HLA-DRB1*14:01L HLA-DPA1*01:03-B1*04:01L HLA-DRB1*12:01L
VGYQPYRVVVL

SEQ ID NO: 19953 - protein, 14 aa, Severe acute respiratory syndrome coronavirus 2
  REGION 1..14: note = Table B: HLA-DRB1*01:02L
HAPATVCGPKKSTN

SEQ ID NO: 19954 - protein, 11 aa, Severe acute respiratory syndrome coronavirus 2
  REGION 1..11: note = Table B: HLA-DRB1*01:02L
NFNGLTGTGVL

SEQ ID NO: 19955 - protein, 11 aa, Severe acute respiratory syndrome coronavirus 2
  REGION 1..11: note = Table B: HLA-DRB1*01:02L
FNGLTGTGVLT

SEQ ID NO: 19956 - protein, 12 aa, Severe acute respiratory syndrome coronavirus 2
  REGION 1..12: note = Table B: HLA-DRB1*01:02L
GTGVLTESNKKF

SEQ ID NO: 19957 - protein, 14 aa, Severe acute respiratory syndrome coronavirus 2
  REGION 1..14: note = Table B: HLA-DRB1*01:02L HLA-DRB1*15:03L
GRDIADTTDAVRDP

SEQ ID NO: 19958 - protein, 14 aa, Severe acute respiratory syndrome coronavirus 2
  REGION 1..14: note = Table B: HLA-DRB1*01:02L
GGVSVITPGTNTSN

SEQ ID NO: 19959 - protein, 16 aa, Severe acute respiratory syndrome coronavirus 2
  REGION 1..16: note = Table B: HLA-DRB1*01:02L
TPGTNTSNQVAVLYQD

SEQ ID NO: 19960 - protein, 13 aa, Severe acute respiratory syndrome coronavirus 2
  REGION 1..13: note = Table B: HLA-DRB1*01:02L
QDVNCTEVPVAIH

SEQ ID NO: 19961 - protein, 14 aa, Severe acute respiratory syndrome coronavirus 2
  REGION 1..14: note = Table B: HLA-DRB1*01:02L
DVNCTEVPVAIHAD

SEQ ID NO: 19962 - protein, 12 aa, Severe acute respiratory syndrome coronavirus 2
  REGION 1..12: note = Table B: HLA-DRB1*01:02L
AIHADQLTPTWR

SEQ ID NO: 19963 - protein, 14 aa, Severe acute respiratory syndrome coronavirus 2
  REGION 1..14: note = Table B: HLA-DRB1*01:02L
NVFQTRAGCLIGAE

SEQ ID NO: 19964 - protein, 14 aa, Severe acute respiratory syndrome coronavirus 2
  REGION 1..14: note = Table B: HLA-DRB1*01:02L HLA-DQA1*05:05-B1*03:19L HLA-DPA1*02:01-B1*13:01L
QTRAGCLIGAEHVN

SEQ ID NO: 19965 - protein, 16 aa, Severe acute respiratory syndrome coronavirus 2
  REGION 1..16: note = Table B: HLA-DRB1*01:02L
IPIGAGICASYQTQTN

SEQ ID NO: 19966 - protein, 11 aa, Severe acute respiratory syndrome coronavirus 2
  REGION 1..11: note = Table B: HLA-DRB1*01:02L
SYQTQTNSPRR

SEQ ID NO: 19967 - protein, 11 aa, Severe acute respiratory syndrome coronavirus 2
  REGION 1..11: note = Table B: HLA-DRB1*01:02L HLA-DRB1*04:08L
YQTQTNSPRRA

SEQ ID NO: 19968 - protein, 13 aa, Severe acute respiratory syndrome coronavirus 2
  REGION 1..13: note = Table B: HLA-DRB1*01:02L
NSPRRARSVASQS

SEQ ID NO: 19969 - protein, 13 aa, Severe acute respiratory syndrome coronavirus 2
  REGION 1..13: note = Table B: HLA-DRB1*01:02L HLA-DPA1*02:01-B1*13:01L
SPRRARSVASQSI

SEQ ID NO: 19970 - protein, 12 aa, Severe acute respiratory syndrome coronavirus 2
  REGION 1..12: note = Table B: HLA-DRB1*01:02L
RSVASQSIIAYT

SEQ ID NO: 19971 - protein, 13 aa, Severe acute respiratory syndrome coronavirus 2
  REGION 1..13: note = Table B: HLA-DRB1*01:02L HLA-DQA1*05:01-B1*02:01L HLA-DRB1*12:01L HLA-DPA1*03:01-B1*105:01L HLA-DRB1*10:01L HLA-DRB1*16:01L HLA-DRB1*15:03L
IAYTMSLGAENSV

SEQ ID NO: 19972 - protein, 15 aa, Severe acute respiratory syndrome coronavirus 2
  REGION 1..15: note = Table B: HLA-DRB1*01:02L
TMSLGAENSVAYSNN

SEQ ID NO: 19973 - protein, 14 aa, Severe acute respiratory syndrome coronavirus 2
  REGION 1..14: note = Table B: HLA-DRB1*01:02L
AYSNNSIAIPTNFT

SEQ ID NO: 19974 - protein, 12 aa, Severe acute respiratory syndrome coronavirus 2
  REGION 1..12: note = Table B: HLA-DRB1*01:02L HLA-DPA1*03:01-B1*105:01L HLA-DRB1*16:01L HLA-DRB1*15:03L
NLLLQYGSFCTQ

SEQ ID NO: 19975 - protein, 13 aa, Severe acute respiratory syndrome coronavirus 2
  REGION 1..13: note = Table B: HLA-DRB1*01:02L HLA-DRB1*08:04L HLA-DRB1*14:01L HLA-DRB1*08:01L
GSFCTQLNRALTG

SEQ ID NO: 19976 - protein, 12 aa, Severe acute respiratory syndrome coronavirus 2
  REGION 1..12: note = Table B: HLA-DRB1*01:02L HLA-DPA1*01:03-B1*03:01L HLA-DPA1*01:03-B1*04:02L HLA-DPA1*02:01-B1*13:01L HLA-DRB1*15:03L
ALTGIAVEQDKN

SEQ ID NO: 19977 - protein, 15 aa, Severe acute respiratory syndrome coronavirus 2
  REGION 1..15: note = Table B: HLA-DRB1*01:02L HLA-DQA1*01:01-B1*05:01L HLA-DRB1*04:08L
VEQDKNTQEVFAQVK

SEQ ID NO: 19978 - protein, 13 aa, Severe acute respiratory syndrome coronavirus 2
  REGION 1..13: note = Table B: HLA-DRB1*01:02L HLA-DPA1*02:01-B1*13:01L
DKNTQEVFAQVKQ

SEQ ID NO: 19979 - protein, 14 aa, Severe acute respiratory syndrome coronavirus 2
  REGION 1..14: note = Table B: HLA-DRB1*01:02L HLA-DPA1*02:01-B1*13:01L HLA-DRB1*16:01L HLA-DRB1*15:03L
KPSKRSFIEDLLFN

SEQ ID NO: 19980 - protein, 14 aa, Severe acute respiratory syndrome coronavirus 2
  REGION 1..14: note = Table B: HLA-DRB1*01:02L HLA-DRB1*15:03L
PSKRSFIEDLLFNK

SEQ ID NO: 19981 - protein, 13 aa, Severe acute respiratory syndrome coronavirus 2
  REGION 1..13: note = Table B: HLA-DRB1*01:02L HLA-DRB1*04:08L
KQYGDCLGDIAAR

SEQ ID NO: 19982 - protein, 14 aa, Severe acute respiratory syndrome coronavirus 2
  REGION 1..14: note = Table B: HLA-DRB1*01:02L
AARDLICAQKFNGL

SEQ ID NO: 19983 - protein, 15 aa, Severe acute respiratory syndrome coronavirus 2
  REGION 1..15: note = Table B: HLA-DRB1*01:02L HLA-DQA1*05:05-B1*03:01L
AQKFNGLTVLPPLLT

SEQ ID NO: 19984 - protein, 14 aa, Severe acute respiratory syndrome coronavirus 2
  REGION 1..14: note = Table B: HLA-DRB1*01:02L HLA-DRB1*12:01L HLA-DQA1*05:05-B1*03:01L HLA-DRB1*15:03L
FNGLTVLPPLLTDE

SEQ ID NO: 19985 - protein, 14 aa, Severe acute respiratory syndrome coronavirus 2
  REGION 1..14: note = Table B: HLA-DRB1*01:02L HLA-DQA1*05:05-B1*03:01L
NGLTVLPPLLTDEM

SEQ ID NO: 19986 - protein, 13 aa, Severe acute respiratory syndrome coronavirus 2
  REGION 1..13: note = Table B: HLA-DRB1*01:02L HLA-DRB1*15:01L
DEMIAQYTSALLA

SEQ ID NO: 19987 - protein, 14 aa, Severe acute respiratory syndrome coronavirus 2
  REGION 1..14: note = Table B: HLA-DRB1*01:02L HLA-DPA1*01:03-B1*03:01L HLA-DPA1*01:03-B1*04:02L HLA-DRB1*04:08L
TSALLAGTITSGWT

SEQ ID NO: 19988 - protein, 14 aa, Severe acute respiratory syndrome coronavirus 2
  REGION 1..14: note = Table B: HLA-DRB1*01:02L HLA-DPA1*01:03-B1*03:01L HLA-DRB1*12:01L HLA-DPA1*03:01-B1*105:01L HLA-DRB1*16:01L HLA-DRB1*15:03L
ITSGWTFGAGAALQ

SEQ ID NO: 19989 - protein, 14 aa, Severe acute respiratory syndrome coronavirus 2
  REGION 1..14: note = Table B: HLA-DRB1*01:02L HLA-DRB1*15:03L
SGWTFGAGAALQIP

SEQ ID NO: 19990 - protein, 14 aa, Severe acute respiratory syndrome coronavirus 2
  REGION 1..14: note = Table B: HLA-DRB1*01:02L
GWTFGAGAALQIPF

SEQ ID NO: 19991 - protein, 14 aa, Severe acute respiratory syndrome coronavirus 2
  REGION 1..14: note = Table B: HLA-DRB1*01:02L HLA-DPA1*03:01-B1*105:01L
AALQIPFAMQMAYR

SEQ ID NO: 19992 - protein, 12 aa, Severe acute respiratory syndrome coronavirus 2
  REGION 1..12: note = Table B: HLA-DRB1*01:02L HLA-DRB1*14:54L
FNGIGVTQNVLY

SEQ ID NO: 19993 - protein, 13 aa, Severe acute respiratory syndrome coronavirus 2
  REGION 1..13: note = Table B: HLA-DRB1*01:02L
VTQNVLYENQKLI

SEQ ID NO: 19994 - protein, 12 aa, Severe acute respiratory syndrome coronavirus 2
  REGION 1..12: note = Table B: HLA-DRB1*01:02L HLA-DRB1*11:04L HLA-DQA1*05:01-B1*02:01L HLA-DRB1*12:01L HLA-DQA1*05:05-B1*03:01L HLA-DRB1*10:01L HLA-DRB1*15:03L
AIGKIQDSLSST

SEQ ID NO: 19995 - protein, 12 aa, Severe acute respiratory syndrome coronavirus 2
  REGION 1..12: note = Table B: HLA-DRB1*01:02L
SLSSTASALGKL

SEQ ID NO: 19996 - protein, 14 aa, Severe acute respiratory syndrome coronavirus 2
  REGION 1..14: note = Table B: HLA-DRB1*01:02L HLA-DRB1*12:01L HLA-DRB1*04:08L HLA-DRB1*15:03L
LSRLDKVEAEVQID

SEQ ID NO: 19997 - protein, 14 aa, Severe acute respiratory syndrome coronavirus 2
  REGION 1..14: note = Table B: HLA-DRB1*01:02L
KVEAEVQIDRLITG

SEQ ID NO: 19998 - protein, 14 aa, Severe acute respiratory syndrome coronavirus 2
  REGION 1..14: note = Table B: HLA-DRB1*01:02L HLA-DRB1*04:08L
VEAEVQIDRLITGR

SEQ ID NO: 19999 - protein, 13 aa, Severe acute respiratory syndrome coronavirus 2
  REGION 1..13: note = Table B: HLA-DRB1*01:02L HLA-DRB1*14:01L HLA-DQA1*03:01-B1*03:02L HLA-DRB1*15:03L
ITGRLQSLQTYVT

SEQ ID NO: 20000 - protein, 12 aa, Severe acute respiratory syndrome coronavirus 2
  REGION 1..12: note = Table B: HLA-DRB1*01:02L HLA-DRB1*12:01L
LQSLQTYVTQQL

SEQ ID NO: 20001 - protein, 11 aa, Severe acute respiratory syndrome coronavirus 2
  REGION 1..11: note = Table B: HLA-DRB1*01:02L
LIRAAEIRASA

SEQ ID NO: 20002 - protein, 14 aa, Severe acute respiratory syndrome coronavirus 2
  REGION 1..14: note = Table B: HLA-DRB1*01:02L HLA-DPA1*01:03-B1*02:01L HLA-DRB1*15:03L
SANLAATKMSECVL

SEQ ID NO: 20003 - protein, 14 aa, Severe acute respiratory syndrome coronavirus 2
  REGION 1..14: note = Table B: HLA-DRB1*01:02L HLA-DPA1*01:03-B1*02:01L HLA-DRB1*04:08L HLA-DRB1*15:03L
ANLAATKMSECVLG

SEQ ID NO: 20004 - protein, 14 aa, Severe acute respiratory syndrome coronavirus 2
  REGION 1..14: note = Table B: HLA-DRB1*01:02L
KMSECVLGQSKRVD

SEQ ID NO: 20005 - protein, 13 aa, Severe acute respiratory syndrome coronavirus 2
  REGION 1..13: note = Table B: HLA-DRB1*01:02L
VFLHVTYVPAQEK

SEQ ID NO: 20006 - protein, 12 aa, Severe acute respiratory syndrome coronavirus 2
  REGION 1..12: note = Table B: HLA-DRB1*01:02L HLA-DRB1*04:08L
FTTAPAICHDGK

SEQ ID NO: 20007 - protein, 14 aa, Severe acute respiratory syndrome coronavirus 2
  REGION 1..14: note = Table B: HLA-DRB1*01:02L
TAPAICHDGKAHFP

SEQ ID NO: 20008 - protein, 15 aa, Severe acute respiratory syndrome coronavirus 2
  REGION 1..15: note = Table B: HLA-DRB1*01:02L
GKAHFPREGVFVSNG

SEQ ID NO: 20009 - protein, 14 aa, Severe acute respiratory syndrome coronavirus 2
  REGION 1..14: note = Table B: HLA-DRB1*01:02L
FPREGVFVSNGTHW

SEQ ID NO: 20010 - protein, 14 aa, Severe acute respiratory syndrome coronavirus 2
  REGION 1..14: note = Table B: HLA-DRB1*01:02L HLA-DPA1*03:01-B1*105:01L
VSNGTHWFVTQRNF

SEQ ID NO: 20011 - protein, 13 aa, Severe acute respiratory syndrome coronavirus 2
  REGION 1..13: note = Table B: HLA-DRB1*01:02L HLA-DRB1*08:04L
NGTHWFVTQRNFY

SEQ ID NO: 20012 - protein, 12 aa, Severe acute respiratory syndrome coronavirus 2
  REGION 1..12: note = Table B: HLA-DRB1*01:02L
VIGIVNNTVYDP

SEQ ID NO: 20013 - protein, 12 aa, Severe acute respiratory syndrome coronavirus 2
  REGION 1..12: note = Table B: HLA-DRB1*01:02L HLA-DPA1*01:03-B1*03:01L HLA-DRB1*14:02L HLA-DPA1*01:03-B1*04:02L HLA-DQA1*05:05-B1*03:01L
VYDPLQPELDSF

SEQ ID NO: 20014 - protein, 13 aa, Severe acute respiratory syndrome coronavirus 2
  REGION 1..13: note = Table B: HLA-DRB1*01:02L
LDSFKEELDKYFK

SEQ ID NO: 20015 - protein, 14 aa, Severe acute respiratory syndrome coronavirus 2
  REGION 1..14: note = Table B: HLA-DRB1*01:02L
DSFKEELDKYFKNH

SEQ ID NO: 20016 - protein, 12 aa, Severe acute respiratory syndrome coronavirus 2
  REGION 1..12: note = Table B: HLA-DRB1*01:02L HLA-DQA1*05:01-B1*02:01L HLA-DRB1*12:01L HLA-DPA1*02:01-B1*13:01L HLA-DQA1*01:03-B1*06:01L HLA-DRB1*15:03L
FKNHTSPDVDLG

SEQ ID NO: 20017 - protein, 15 aa, Severe acute respiratory syndrome coronavirus 2
  REGION 1..15: note = Table B: HLA-DRB1*01:02L HLA-DPA1*01:03-B1*03:01L
SPDVDLGDISGINAS

SEQ ID NO: 20018 - protein, 12 aa, Severe acute respiratory syndrome coronavirus 2
  REGION 1..12: note = Table B: HLA-DRB1*01:02L
KEIDRLNEVAKN

SEQ ID NO: 20019 - protein, 13 aa, Severe acute respiratory syndrome coronavirus 2
  REGION 1..13: note = Table B: HLA-DRB1*01:02L HLA-DRB1*11:04L HLA-DRB1*11:01L HLA-DRB1*16:01L HLA-DRB1*08:03L
DRLNEVAKNLNES

SEQ ID NO: 20020 - protein, 14 aa, Severe acute respiratory syndrome coronavirus 2
  REGION 1..14: note = Table B: HLA-DRB1*01:02L HLA-DPA1*01:03-B1*03:01L HLA-DPA1*03:01-B1*04:02L
AKNLNESLIDLQEL

SEQ ID NO: 20021 - protein, 13 aa, Severe acute respiratory syndrome coronavirus 2
  REGION 1..13: note = Table B: HLA-DRB1*01:02L
NESLIDLQELGKY

SEQ ID NO: 20022 - protein, 12 aa, Severe acute respiratory syndrome coronavirus 2
  REGION 1..12: note = Table B: HLA-DRB1*01:02L HLA-DRB1*04:08L
SLIDLQELGKYE

SEQ ID NO: 20023 - protein, 12 aa, Severe acute respiratory syndrome coronavirus 2
  REGION 1..12: note = Table B: HLA-DRB1*01:02L HLA-DRB1*08:04L HLA-DRB1*04:08L
LIDLQELGKYEQ

SEQ ID NO: 20024 - protein, 14 aa, Severe acute respiratory syndrome coronavirus 2
  REGION 1..14: note = Table B: HLA-DRB1*01:02L
LQELGKYEQYIKWP

SEQ ID NO: 20025 - protein, 12 aa, Severe acute respiratory syndrome coronavirus 2
  REGION 1..12: note = Table B: HLA-DRB1*01:02L HLA-DRB3*01:01L HLA-DPA1*03:01-B1*105:01L
KFDEDDSEPVLK

SEQ ID NO: 20026 - protein, 12 aa, Severe acute respiratory syndrome coronavirus 2
  REGION 1..12: note = Table B: HLA-DRB1*01:02L HLA-DQA1*03:01-B1*03:02L HLA-DQA1*01:03-B1*06:01L
EPVLKGVKLHYT

SEQ ID NO: 20027 - protein, 14 aa, Severe acute respiratory syndrome coronavirus 2
  REGION 1..14: note = Table B: HLA-DRB1*01:02L HLA-DRB1*12:01L HLA-DQA1*05:05-B1*03:01L HLA-DRB1*15:03L
IVGVALLAVFQSAS

SEQ ID NO: 20028 - protein, 12 aa, Severe acute respiratory syndrome coronavirus 2
  REGION 1..12: note = Table B: HLA-DRB1*01:02L HLA-DRB1*16:01L
FVTVYSHLLLVA

SEQ ID NO: 20029 - protein, 12 aa, Severe acute respiratory syndrome coronavirus 2
  REGION 1..12: note = Table B: HLA-DRB1*01:02L
PYNSVTSSIVIT

SEQ ID NO: 20030 - protein, 13 aa, Severe acute respiratory syndrome coronavirus 2
  REGION 1..13: note = Table B: HLA-DRB1*01:02L
GDGTTSPISEHDY

SEQ ID NO: 20031 - protein, 13 aa, Severe acute respiratory syndrome coronavirus 2
  REGION 1..13: note = Table B: HLA-DRB1*01:02L HLA-DRB1*04:10L
DGTTSPISEHDYQ

SEQ ID NO: 20032 - protein, 12 aa, Severe acute respiratory syndrome coronavirus 2
  REGION 1..12: note = Table B: HLA-DRB1*01:02L
DYQIGGYTEKWE

SEQ ID NO: 20033 - protein, 13 aa, Severe acute respiratory syndrome coronavirus 2
  REGION 1..13: note = Table B: HLA-DRB1*01:02L
YQIGGYTEKWESG

SEQ ID NO: 20034 - protein, 13 aa, Severe acute respiratory syndrome coronavirus 2
  REGION 1..13: note = Table B: HLA-DRB1*01:02L HLA-DPA1*02:01-B1*13:01L HLA-DQA1*03:01-B1*03:02L HLA-DPA1*01:02-B1*04:01L
VVLHSYFTSDYYQ

SEQ ID NO: 20035 - protein, 11 aa, Severe acute respiratory syndrome coronavirus 2
  REGION 1..11: note = Table B: HLA-DRB1*01:02L
YYQLYSTQLST

SEQ ID NO: 20036 - protein, 15 aa, Severe acute respiratory syndrome coronavirus 2
  REGION 1..15: note = Table B: HLA-DRB1*01:02L HLA-DRB1*04:10L HLA-DRB1*12:01L
EPEEHVQIHTIDGSS

SEQ ID NO: 20037 - protein, 12 aa, Severe acute respiratory syndrome coronavirus 2
  REGION 1..12: note = Table B: HLA-DRB1*01:02L HLA-DRB1*14:01L HLA-DRB1*16:01L
LAILTALRLCAY

SEQ ID NO: 20038 - protein, 12 aa, Severe acute respiratory syndrome coronavirus 2
  REGION 1..12: note = Table B: HLA-DRB1*01:02L
VSLVKPSFYVYS

SEQ ID NO: 20039 - protein, 12 aa, Severe acute respiratory syndrome coronavirus 2
  REGION 1..12: note = Table B: HLA-DRB1*01:02L HLA-DRB1*08:04L HLA-DPA1*03:01-B1*04:02L HLA-DRB1*14:01L HLA-DRB1*12:01L HLA-DPA1*03:01-B1*105:01L HLA-DRB1*15:03L
PSFYVYSRVKNL

SEQ ID NO: 20040 - protein, 14 aa, Severe acute respiratory syndrome coronavirus 2
  REGION 1..14: note = Table B: HLA-DRB1*01:02L
VEELKKLLEQWNLV

SEQ ID NO: 20041 - protein, 12 aa, Severe acute respiratory syndrome coronavirus 2
  REGION 1..12: note = Table B: HLA-DRB1*01:02L HLA-DRB1*12:01L HLA-DPA1*02:01-B1*13:01L HLA-DPA1*03:01-B1*105:01L HLA-DRB1*15:03L
KKLLEQWNLVIG

SEQ ID NO: 20042 - protein, 13 aa, Severe acute respiratory syndrome coronavirus 2
  REGION 1..13: note = Table B: HLA-DRB1*01:02L
ICLLQFAYANRNR

SEQ ID NO: 20043 - protein, 11 aa, Severe acute respiratory syndrome coronavirus 2
  REGION 1..11: note = Table B: HLA-DRB1*01:02L HLA-DPA1*03:01-B1*04:02L HLA-DPA1*03:01-B1*105:01L
LQFAYANRNRF

SEQ ID NO: 20044 - protein, 10 aa, Severe acute respiratory syndrome coronavirus 2
  REGION 1..10: note = Table B: HLA-DRB1*01:02L HLA-DRB1*14:01L HLA-DPA1*01:02-B1*04:01L HLA-DRB1*16:01L HLA-DQA1*02:01-B1*03:03L HLA-DRB1*15:03L
FAYANRNRFL

SEQ ID NO: 20045 - protein, 12 aa, Severe acute respiratory syndrome coronavirus 2
  REGION 1..12: note = Table B: HLA-DRB1*01:02L
YANRNRFLYIIK

SEQ ID NO: 20046 - protein, 14 aa, Severe acute respiratory syndrome coronavirus 2
  REGION 1..14: note = Table B: HLA-DRB1*01:02L
FRLFARTRSMWSFN

SEQ ID NO: 20047 - protein, 13 aa, Severe acute respiratory syndrome coronavirus 2
  REGION 1..13: note = Table B: HLA-DRB1*01:02L HLA-DPA1*02:01-B1*13:01L
RTRSMWSFNPETN

SEQ ID NO: 20048 - protein, 11 aa, Severe acute respiratory syndrome coronavirus 2
  REGION 1..11: note = Table B: HLA-DRB1*01:02L
SFNPETNILLN

SEQ ID NO: 20049 - protein, 12 aa, Severe acute respiratory syndrome coronavirus 2
  REGION 1..12: note = Table B: HLA-DRB1*01:02L
NVPLHGTILTRP

SEQ ID NO: 20050 - protein, 14 aa, Severe acute respiratory syndrome coronavirus 2
  REGION 1..14: note = Table B: HLA-DRB1*01:02L HLA-DPA1*02:01-B1*13:01L HLA-DRB1*15:03L
ILTRPLLESELVIG

SEQ ID NO: 20051 - protein, 14 aa, Severe acute respiratory syndrome coronavirus 2
  REGION 1..14: note = Table B: HLA-DRB1*01:02L HLA-DRB1*15:03L
LESELVIGAVILRG

SEQ ID NO: 20052 - protein, 13 aa, Severe acute respiratory syndrome coronavirus 2
  REGION 1..13: note = Table B: HLA-DRB1*01:02L HLA-DRB1*04:08L
SELVIGAVILRGH

SEQ ID NO: 20053 - protein, 15 aa, Severe acute respiratory syndrome coronavirus 2
  REGION 1..15: note = Table B: HLA-DRB1*01:02L
HLRIAGHHLGRCDIK

SEQ ID NO: 20054 - protein, 14 aa, Severe acute respiratory syndrome coronavirus 2
  REGION 1..14: note = Table B: HLA-DRB1*01:02L
RIAGHHLGRCDIKD

SEQ ID NO: 20055 - protein, 14 aa, Severe acute respiratory syndrome coronavirus 2
  REGION 1..14: note = Table B: HLA-DRB1*01:02L HLA-DRB1*08:01L
GHHLGRCDIKDLPK

SEQ ID NO: 20056 - protein, 12 aa, Severe acute respiratory syndrome coronavirus 2
  REGION 1..12: note = Table B: HLA-DRB1*01:02L HLA-DRB1*04:08L
TVATSRTLSYYK

SEQ ID NO: 20057 - protein, 13 aa, Severe acute respiratory syndrome coronavirus 2
  REGION 1..13: note = Table B: HLA-DRB1*01:02L
VATSRTLSYYKLG

SEQ ID NO: 20058 - protein, 11 aa, Severe acute respiratory syndrome coronavirus 2
  REGION 1..11: note = Table B: HLA-DRB1*01:02L HLA-DQA1*05:05-B1*03:19L HLA-DRB1*15:03L
SYYKLGASQRV

SEQ ID NO: 20059 - protein, 12 aa, Severe acute respiratory syndrome coronavirus 2
  REGION 1..12: note = Table B: HLA-DRB1*01:02L HLA-DRB1*14:01L HLA-DRB1*12:01L HLA-DRB1*16:01L HLA-DRB1*15:03L
FAAYSRYRIGNY

SEQ ID NO: 20060 - protein, 12 aa, Severe acute respiratory syndrome coronavirus 2
  REGION 1..12: note = Table B: HLA-DRB1*01:02L HLA-DRB1*08:04L HLA-DRB1*11:03L HLA-DQA1*03:01-B1*03:02L HLA-DRB1*10:01L HLA-DRB1*15:03L
NYKLNTDHSSSS

SEQ ID NO: 20061 - protein, 13 aa, Severe acute respiratory syndrome coronavirus 2
  REGION 1..13: note = Table B: HLA-DRB1*01:02L HLA-DRB1*14:01L HLA-DPA1*02:01-B1*13:01L
IKNLSKSLTENKY

SEQ ID NO: 20062 - protein, 13 aa, Severe acute respiratory syndrome coronavirus 2
  REGION 1..13: note = Table B: HLA-DRB1*01:02L
NLSKSLTENKYSQ

SEQ ID NO: 20063 - protein, 12 aa, Severe acute respiratory syndrome coronavirus 2
  REGION 1..12: note = Table B: HLA-DRB1*01:02L HLA-DRB1*12:01L HLA-DRB1*15:03L
ALITLATCELYH

SEQ ID NO: 20064 - protein, 13 aa, Severe acute respiratory syndrome coronavirus 2
  REGION 1..13: note = Table B: HLA-DRB1*01:02L
LITLATCELYHYQ

SEQ ID NO: 20065 - protein, 15 aa, Severe acute respiratory syndrome coronavirus 2
  REGION 1..15: note = Table B: HLA-DRB1*01:02L
GTTVLLKEPCSSGTY

SEQ ID NO: 20066 - protein, 14 aa, Severe acute respiratory syndrome coronavirus 2
  REGION 1..14: note = Table B: HLA-DRB1*01:02L HLA-DPA1*01:03-B1*03:01L HLA-DRB1*15:03L
TYEGNSPFHPLADN

SEQ ID NO: 20067 - protein, 14 aa, Severe acute respiratory syndrome coronavirus 2
  REGION 1..14: note = Table B: HLA-DRB1*01:02L
YEGNSPFHPLADNK

SEQ ID NO: 20068 - protein, 15 aa, Severe acute respiratory syndrome coronavirus 2
  REGION 1..15: note = Table B: HLA-DRB1*01:02L
LTCFSTQFAFACPDG

SEQ ID NO: 20069 - protein, 14 aa, Severe acute respiratory syndrome coronavirus 2
  REGION 1..14: note = Table B: HLA-DRB1*01:02L
FAFACPDGVKHVYQ

SEQ ID NO: 20070 - protein, 13 aa, Severe acute respiratory syndrome coronavirus 2
  REGION 1..13: note = Table B: HLA-DRB1*01:02L
PDGVKHVYQLRAR

SEQ ID NO: 20071 - protein, 13 aa, Severe acute respiratory syndrome coronavirus 2
  REGION 1..13: note = Table B: HLA-DRB1*01:02L
LRARSVSPKLFIR

SEQ ID NO: 20072 - protein, 14 aa, Severe acute respiratory syndrome coronavirus 2
  REGION 1..14: note = Table B: HLA-DRB1*01:02L
RARSVSPKLFIRQE

SEQ ID NO: 20073 - protein, 12 aa, Severe acute respiratory syndrome coronavirus 2
  REGION 1..12: note = Table B: HLA-DRB1*01:02L HLA-DQA1*05:05-B1*03:01L
LFIRQEEVQELY

SEQ ID NO: 20074 - protein, 12 aa, Severe acute respiratory syndrome coronavirus 2
  REGION 1..12: note = Table B: HLA-DRB1*01:02L
FIRQEEVQELYS

SEQ ID NO: 20075 - protein, 10 aa, Severe acute respiratory syndrome coronavirus 2
  REGION 1..10: note = Table B: HLA-DRB1*01:02L HLA-DRB1*16:01L
ITLCFTLKRK

SEQ ID NO: 20076 - protein, 14 aa, Severe acute respiratory syndrome coronavirus 2
  REGION 1..14: note = Table B: HLA-DRB1*01:02L HLA-DQA1*05:05-B1*03:01L
AAFHQECSLQSCTQ

SEQ ID NO: 20077 - protein, 13 aa, Severe acute respiratory syndrome coronavirus 2
  REGION 1..13: note = Table B: HLA-DRB1*01:02L HLA-DRB1*08:01L HLA-DRB1*12:01L
PIHFYSKWYIRVG

SEQ ID NO: 20078 - protein, 14 aa, Severe acute respiratory syndrome coronavirus 2
  REGION 1..14: note = Table B: HLA-DRB1*01:02L HLA-DRB1*11:01L HLA-DRB1*12:01L
IHFYSKWYIRVGAR

SEQ ID NO: 20079 - protein, 14 aa, Severe acute respiratory syndrome coronavirus 2
  REGION 1..14: note = Table B: HLA-DRB1*01:02L
HFYSKWYIRVGARK

SEQ ID NO: 20080 - protein, 14 aa, Severe acute respiratory syndrome coronavirus 2
  REGION 1..14: note = Table B: HLA-DRB1*01:02L HLA-DRB1*08:01L HLA-DRB1*11:01L
VDEAGSKSPIQYID

SEQ ID NO: 20081 - protein, 16 aa, Severe acute respiratory syndrome coronavirus 2
  REGION 1..16: note = Table B: HLA-DRB1*01:02L HLA-DRB1*15:03L
YTVSCLPFTINCQEPK

SEQ ID NO: 20082 - protein, 14 aa, Severe acute respiratory syndrome coronavirus 2
  REGION 1..14: note = Table B: HLA-DRB1*01:02L
INCQEPKLGSLVVR

SEQ ID NO: 20083 - protein, 13 aa, Severe acute respiratory syndrome coronavirus 2
  REGION 1..13: note = Table B: HLA-DRB1*01:02L
QEPKLGSLVVRCS

SEQ ID NO: 20084 - protein, 15 aa, Severe acute respiratory syndrome coronavirus 2
  REGION 1..15: note = Table B: HLA-DRB1*01:02L
EPKLGSLVVRCSFYE

SEQ ID NO: 20085 - protein, 16 aa, Severe acute respiratory syndrome coronavirus 2
  REGION 1..16: note = Table B: HLA-DRB1*01:02L HLA-DQA1*01:03-B1*06:01L
GPQNQRNAPRITFGGP

SEQ ID NO: 20086 - protein, 14 aa, Severe acute respiratory syndrome coronavirus 2
  REGION 1..14: note = Table B: HLA-DRB1*01:02L
NGERSGARSKQRRP

SEQ ID NO: 20087 - protein, 14 aa, Severe acute respiratory syndrome coronavirus 2
  REGION 1..14: note = Table B: HLA-DRB1*01:02L
GERSGARSKQRRPQ

SEQ ID NO: 20088 - protein, 14 aa, Severe acute respiratory syndrome coronavirus 2
  REGION 1..14: note = Table B: HLA-DRB1*01:02L HLA-DRB1*12:01L HLA-DPA1*02:01-B1*13:01L
SKQRRPQGLPNNTA

SEQ ID NO: 20089 - protein, 15 aa, Severe acute respiratory syndrome coronavirus 2
  REGION 1..15: note = Table B: HLA-DRB1*01:02L HLA-DRB1*16:01L
TQHGKEDLKFPRGQG

SEQ ID NO: 20090 - protein, 14 aa, Severe acute respiratory syndrome coronavirus 2
  REGION 1..14: note = Table B: HLA-DRB1*01:02L
TNSSPDDQIGYYRR

SEQ ID NO: 20091 - protein, 12 aa, Severe acute respiratory syndrome coronavirus 2
  REGION 1..12: note = Table B: HLA-DRB1*01:02L HLA-DRB1*08:01L HLA-DRB3*01:01L HLA-DRB1*16:01L HLA-DRB1*04:08L
IGYYRRATRRIR

SEQ ID NO: 20092 - protein, 12 aa, Severe acute respiratory syndrome coronavirus 2
  REGION 1..12: note = Table B: HLA-DRB1*01:02L HLA-DPA1*03:01-B1*105:01L HLA-DPA1*01:02-B1*04:01L
DGKMKDLSPRWY

SEQ ID NO: 20093 - protein, 13 aa, Severe acute respiratory syndrome coronavirus 2
  REGION 1..13: note = Table B: HLA-DRB1*01:02L HLA-DPA1*01:03-B1*03:01L
TGPEAGLPYGANK

SEQ ID NO: 20094 - protein, 13 aa, Severe acute respiratory syndrome coronavirus 2
  REGION 1..13: note = Table B: HLA-DRB1*01:02L HLA-DRB1*12:01L
GPEAGLPYGANKD

SEQ ID NO: 20095 - protein, 12 aa, Severe acute respiratory syndrome coronavirus 2
  REGION 1..12: note = Table B: HLA-DRB1*01:02L HLA-DRB1*08:01L HLA-DQA1*05:05-B1*03:19L HLA-DPA1*03:01-B1*105:01L HLA-DRB1*14:54L HLA-DRB1*10:01L HLA-DRB1*04:08L
ATEGALNTPKDH

SEQ ID NO: 20096 - protein, 14 aa, Severe acute respiratory syndrome coronavirus 2
  REGION 1..14: note = Table B: HLA-DRB1*01:02L
EGALNTPKDHIGTR

SEQ ID NO: 20097 - protein, 16 aa, Severe acute respiratory syndrome coronavirus 2
  REGION 1..16: note = Table B: HLA-DRB1*01:02L
GALNTPKDHIGTRNPA

SEQ ID NO: 20098 - protein, 12 aa, Severe acute respiratory syndrome coronavirus 2
  REGION 1..12: note = Table B: HLA-DRB1*01:02L
VLQLPQGTTLPK

SEQ ID NO: 20099 - protein, 15 aa, Severe acute respiratory syndrome coronavirus 2
  REGION 1..15: note = Table B: HLA-DRB1*01:02L
LPQGTTLPKGFYAEG

SEQ ID NO: 20100 - protein, 14 aa, Severe acute respiratory syndrome coronavirus 2
  REGION 1..14: note = Table B: HLA-DRB1*01:02L
YAEGSRGGSQASSR

SEQ ID NO: 20101 - protein, 14 aa, Severe acute respiratory syndrome coronavirus 2
  REGION 1..14: note = Table B: HLA-DRB1*01:02L HLA-DRB1*08:01L HLA-DRB1*04:08L
SRGGSQASSRSSSR

SEQ ID NO: 20102 - protein, 14 aa, Severe acute respiratory syndrome coronavirus 2
  REGION 1..14: note = Table B: HLA-DRB1*01:02L
SRNSSRNSTPGSSR

SEQ ID NO: 20103 - protein, 16 aa, Severe acute respiratory syndrome coronavirus 2
  REGION 1..16: note = Table B: HLA-DRB1*01:02L
SSRNSTPGSSRGTSPA

SEQ ID NO: 20104 - protein, 16 aa, Severe acute respiratory syndrome coronavirus 2
  REGION 1..16: note = Table B: HLA-DRB1*01:02L
SSRGTSPARMAGNGGD

SEQ ID NO: 20105 - protein, 14 aa, Severe acute respiratory syndrome coronavirus 2
  REGION 1..14: note = Table B: HLA-DRB1*01:02L HLA-DPA1*01:03-B1*03:01L HLA-DRB1*14:01L HLA-DQA1*01:01-B1*05:01L HLA-DRB1*08:01L HLA-DQA1*05:01-B1*02:01L HLA-DRB1*04:10L HLA-DRB1*12:01L HLA-DPA1*03:01-B1*105:01L HLA-DRB1*04:08L
GTSPARMAGNGGDA

SEQ ID NO: 20106 - protein, 13 aa, Severe acute respiratory syndrome coronavirus 2
  REGION 1..13: note = Table B: HLA-DRB1*01:02L HLA-DRB3*02:01L HLA-DPA1*01:03-B1*03:01L HLA-DQA1*01-B1*05L HLA-DPA1*01:03-B1*04:01L HLA-DPA1*01:03-B1*04:02L HLA-DPA1*02:01-B1*13:01L HLA-DRB1*16:01L HLA-DRB1*04:08L
DAALALLLLDRLN

SEQ ID NO: 20107 - protein, 16 aa, Severe acute respiratory syndrome coronavirus 2
  REGION 1..16: note = Table B: HLA-DRB1*01:02L HLA-DRB1*11:01L HLA-DPA1*02:01-B1*13:01L
LESKMSGKGQQQQGQT

SEQ ID NO: 20108 - protein, 12 aa, Severe acute respiratory syndrome coronavirus 2
  REGION 1..12: note = Table B: HLA-DRB1*01:02L
KKSAAEASKKPR

SEQ ID NO: 20109 - protein, 13 aa, Severe acute respiratory syndrome coronavirus 2
  REGION 1..13: note = Table B: HLA-DRB1*01:02L
KSAAEASKKPRQK

SEQ ID NO: 20110 - protein, 13 aa, Severe acute respiratory syndrome coronavirus 2
  REGION 1..13: note = Table B: HLA-DRB1*01:02L
SAAEASKKPRQKR

SEQ ID NO: 20111 - protein, 16 aa, Severe acute respiratory syndrome coronavirus 2
  REGION 1..16: note = Table B: HLA-DRB1*01:02L HLA-DRB3*01:01L
AAEASKKPRQKRTATK

SEQ ID NO: 20112 - protein, 12 aa, Severe acute respiratory syndrome coronavirus 2
  REGION 1..12: note = Table B: HLA-DRB1*01:02L
RTATKAYNVTQA

SEQ ID NO: 20113 - protein, 12 aa, Severe acute respiratory syndrome coronavirus 2
  REGION 1..12: note = Table B: HLA-DRB1*01:02L HLA-DRB1*04:08L HLA-DQA1*02:01-B1*03:03L
TKAYNVTQAFGR

SEQ ID NO: 20114 - protein, 13 aa, Severe acute respiratory syndrome coronavirus 2
  REGION 1..13: note = Table B: HLA-DRB1*01:02L
QGNFGDQELIRQG

SEQ ID NO: 20115 - protein, 14 aa, Severe acute respiratory syndrome coronavirus 2
  REGION 1..14: note = Table B: HLA-DRB1*01:02L HLA-DRB1*08:04L HLA-DRB1*08:01L HLA-DRB1*15:03L
GNFGDQELIRQGTD

SEQ ID NO: 20116 - protein, 14 aa, Severe acute respiratory syndrome coronavirus 2
  REGION 1..14: note = Table B: HLA-DRB1*01:02L
FGDQELIRQGTDYK

SEQ ID NO: 20117 - protein, 14 aa, Severe acute respiratory syndrome coronavirus 2
  REGION 1..14: note = Table B: HLA-DRB1*01:02L HLA-DRB1*08:04L HLA-DRB1*08:01L HLA-DRB1*12:01L HLA-DRB1*15:03L
TDYKHWPQIAQFAP

SEQ ID NO: 20118 - protein, 13 aa, Severe acute respiratory syndrome coronavirus 2
  REGION 1..13: note = Table B: HLA-DRB1*01:02L HLA-DRB1*04:08L
FAPSASAFFGMSR

SEQ ID NO: 20119 - protein, 12 aa, Severe acute respiratory syndrome coronavirus 2
  REGION 1..12: note = Table B: HLA-DRB1*01:02L
AYKTFPPTEPKK

SEQ ID NO: 20120 - protein, 14 aa, Severe acute respiratory syndrome coronavirus 2
  REGION 1..14: note = Table B: HLA-DRB1*01:02L
YKTFPPTEPKKDKK

SEQ ID NO: 20121 - protein, 14 aa, Severe acute respiratory syndrome coronavirus 2
  REGION 1..14: note = Table B: HLA-DRB1*01:02L HLA-DRB1*04:08L
KTFPPTEPKKDKKK

SEQ ID NO: 20122 - protein, 14 aa, Severe acute respiratory syndrome coronavirus 2
  REGION 1..14: note = Table B: HLA-DRB1*01:02L
FPPTEPKKDKKKKA

SEQ ID NO: 20123 - protein, 14 aa, Severe acute respiratory syndrome coronavirus 2
  REGION 1..14: note = Table B: HLA-DRB1*01:02L
KKKADETQALPQRQ

SEQ ID NO: 20124 - protein, 12 aa, Severe acute respiratory syndrome coronavirus 2
  REGION 1..12: note = Table B: HLA-DRB1*01:02L HLA-DQA1*05:05-B1*03:19L HLA-DRB1*04:08L
ETQALPQRQKKQ

SEQ ID NO: 20125 - protein, 16 aa, Severe acute respiratory syndrome coronavirus 2
  REGION 1..16: note = Table B: HLA-DRB1*01:02L
LPQRQKKQQTVTLLPA

SEQ ID NO: 20126 - protein, 15 aa, Severe acute respiratory syndrome coronavirus 2
  REGION 1..15: note = Table B: HLA-DRB1*01:02L HLA-DPA1*02:01-B1*13:01L HLA-DRB1*04:08L
RQKKQQTVTLLPAAD

SEQ ID NO: 20127 - protein, 13 aa, Severe acute respiratory syndrome coronavirus 2
  REGION 1..13: note = Table B: HLA-DRB1*01:02L HLA-DPA1*01:03-B1*03:01L HLA-DRB1*16:01L HLA-DRB1*15:03L
KQQTVTLLPAADL

SEQ ID NO: 20128 - protein, 12 aa, Severe acute respiratory syndrome coronavirus 2
  REGION 1..12: note = Table B: HLA-DRB1*01:02L HLA-DQA1*05:05-B1*03:19L HLA-DPA1*03:01-B1*105:01L HLA-DQA1*05:05-B1*03:01L
VTLLPAADLDDF

SEQ ID NO: 20129 - protein, 13 aa, Severe acute respiratory syndrome coronavirus 2
  REGION 1..13: note = Table B: HLA-DRB1*01:02L HLA-DPA1*03:01-B1*04:02L HLA-DRB1*12:01L HLA-DRB1*16:01L HLA-DRB1*15:03L
LDDFSKQLQQSMS

SEQ ID NO: 20130 - protein, 14 aa, Severe acute respiratory syndrome coronavirus 2
  REGION 1..14: note = Table B: HLA-DRB1*01:02L
DDFSKQLQQSMSSA

SEQ ID NO: 20131 - protein, 15 aa, Severe acute respiratory syndrome coronavirus 2
  REGION 1..15: note = Table B: HLA-DRB1*01:02L HLA-DQA1*05:05-B1*03:19L HLA-DQA1*05:01-B1*02:01L HLA-DRB1*12:01L HLA-DPA1*01:03-B1*104:01L HLA-DQA1*01:03-B1*06:01L
DFSKQLQQSMSSADS

SEQ ID NO: 20132 - protein, 11 aa, Severe acute respiratory syndrome coronavirus 2
  REGION 1..11: note = Table B: HLA-DRB4*03:01NL HLA-DRB1*08:77L HLA-DPA1*01:03-B1*03:01L HLA-DRB1*03:01L HLA-DRB1*14:01L HLA-DPA1*01:03-B1*04:01L HLA-DPA1*01:03-B1*04:02L HLA-DRB1*12:01L HLA-DPA1*02:01-B1*13:01L
  REGION 1..11: note = CONT. FROM ABOVE: HLA-DPA1*01:03-B1*104:01L HLA-DRB1*10:01L HLA- DQA1*01:03-B1*06:01L HLA-DRB1*08:02L HLA-DRB1*15:03L
VPHVGEIPVAY

SEQ ID NO: 20133 - protein, 15 aa, Severe acute respiratory syndrome coronavirus 2
  REGION 1..15: note = Table B: HLA-DRB4*03:01NL HLA-DRB1*11:03L HLA-DRB1*14:54L HLA-DRB1*07:01L
VTRELMRELNGGAYT

SEQ ID NO: 20134 - protein, 15 aa, Severe acute respiratory syndrome coronavirus 2
  REGION 1..15: note = Table B: HLA-DRB4*03:01NL HLA-DRB1*11:04L HLA-DRB1*14:54L HLA-DRB1*10:01L
GAWNIGEQKSILSPL

SEQ ID NO: 20135 - protein, 12 aa, Severe acute respiratory syndrome coronavirus 2
  REGION 1..12: note = Table B: HLA-DRB4*03:01NL HLA-DRB1*14:54L HLA-DRB1*08:03L
GTVYEKLKPVLD

SEQ ID NO: 20136 - protein, 11 aa, Severe acute respiratory syndrome coronavirus 2
  REGION 1..11: note = Table B: HLA-DRB4*03:01NL HLA-DRB1*14:01L HLA-DRB1*11:01L HLA-DPA1*02:01-B1*13:01L
MLLEIKDTEKY

SEQ ID NO: 20137 - protein, 13 aa, Severe acute respiratory syndrome coronavirus 2
  REGION 1..13: note = Table B: HLA-DRB4*03:01NL HLA-DRB1*08:04L HLA-DRB1*08:77L HLA-DRB3*02:01L
INGNLHPDSATLV

SEQ ID NO: 20138 - protein, 11 aa, Severe acute respiratory syndrome coronavirus 2
  REGION 1..11: note = Table B: HLA-DRB4*03:01NL HLA-DRB1*14:01L HLA-DRB1*08:02L
SEYKGPITDVF

SEQ ID NO: 20139 - protein, 12 aa, Severe acute respiratory syndrome coronavirus 2
  REGION 1..12: note = Table B: HLA-DRB4*03:01NL HLA-DRB1*11:02L
EEVGHTDLMAAY

SEQ ID NO: 20140 - protein, 12 aa, Severe acute respiratory syndrome coronavirus 2
  REGION 1..12: note = Table B: HLA-DRB4*03:01NL HLA-DRB3*02:01L HLA-DPA1*01:03-B1*03:01L HLA-DPA1*03:01-B1*04:02L HLA-DQA1*05:05-B1*03:01L
INLVQMAPISAM

SEQ ID NO: 20141 - protein, 15 aa, Severe acute respiratory syndrome coronavirus 2
  REGION 1..15: note = Table B: HLA-DRB4*03:01NL HLA-DRB1*08:77L HLA-DPA1*01:03-B1*03:01L HLA-DRB1*03:01L HLA-DRB1*11:03L HLA-DRB1*14:02L HLA-DRB1*08:01L HLA-DRB1*11:01L HLA-DQA1*05:05-B1*03:19L HLA-DQA1*05:01-B1*02:01L
  REGION 1..15: note = CONT. FROM ABOVE: HLA-DRB3*01:01L
LDNLRANNTKGSLPI

SEQ ID NO: 20142 - protein, 13 aa, Severe acute respiratory syndrome coronavirus 2
  REGION 1..13: note = Table B: HLA-DRB4*03:01NL HLA-DRB3*02:01L HLA-DQA1*05:05-B1*03:19L HLA-DPA1*01:03-B1*04:02L HLA-DPA1*01:02-B1*04:01L HLA-DRB1*10:01L
NVIVFDGKSKCEE

SEQ ID NO: 20143 - protein, 13 aa, Severe acute respiratory syndrome coronavirus 2
  REGION 1..13: note = Table B: HLA-DRB4*03:01NL HLA-DRB1*04:10L
ALVSDVGDSAEVA

SEQ ID NO: 20144 - protein, 12 aa, Severe acute respiratory syndrome coronavirus 2
  REGION 1..12: note = Table B: HLA-DRB4*03:01NL HLA-DRB1*16:01L HLA-DRB1*04:08L
TWLDMVDTSLSG

SEQ ID NO: 20145 - protein, 12 aa, Severe acute respiratory syndrome coronavirus 2
  REGION 1..12: note = Table B: HLA-DRB4*03:01NL HLA-DQA1*01-B1*05L HLA-DRB1*04:10L HLA-DPA1*03:01-B1*105:01L HLA-DRB1*16:01L HLA-DRB1*04:08L
AFATAQEAYEQA

SEQ ID NO: 20146 - protein, 14 aa, Severe acute respiratory syndrome coronavirus 2
  REGION 1..14: note = Table B: HLA-DRB4*03:01NL HLA-DRB3*02:01L HLA-DPA1*01:03-B1*03:01L HLA-DPA1*03:01-B1*04:02L HLA-DPA1*02:01-B1*13:01L HLA-DPA1*01:03-B1*02:01L HLA-DPA1*01:03-B1*104:01L
LGSLAATVRLQAGN

SEQ ID NO: 20147 - protein, 12 aa, Severe acute respiratory syndrome coronavirus 2
  REGION 1..12: note = Table B: HLA-DRB4*03:01NL HLA-DRB1*04:10L HLA-DPA1*03:01-B1*105:01L HLA-DQA1*05:05-B1*03:01L HLA-DRB1*16:01L
GIVGVLTLDNQD

SEQ ID NO: 20148 - protein, 12 aa, Severe acute respiratory syndrome coronavirus 2
  REGION 1..12: note = Table B: HLA-DRB4*03:01NL HLA-DRB1*04:10L HLA-DRB1*12:01L HLA-DPA1*03:01-B1*105:01L HLA-DRB1*14:54L HLA-DQA1*05:05-B1*03:01L HLA-DRB1*16:01L
IVGVLTLDNQDL

SEQ ID NO: 20149 - protein, 12 aa, Severe acute respiratory syndrome coronavirus 2
  REGION 1..12: note = Table B: HLA-DRB4*03:01NL HLA-DRB1*16:01L
GVLTLDNQDLNG

SEQ ID NO: 20150 - protein, 14 aa, Severe acute respiratory syndrome coronavirus 2
  REGION 1..14: note = Table B: HLA-DRB4*03:01NL HLA-DRB1*11:02L
WDLLKYDFTEERLK

SEQ ID NO: 20151 - protein, 13 aa, Severe acute respiratory syndrome coronavirus 2
  REGION 1..13: note = Table B: HLA-DRB4*03:01NL HLA-DRB1*08:04L
GDDYVYLPYPDPS

SEQ ID NO: 20152 - protein, 15 aa, Severe acute respiratory syndrome coronavirus 2
  REGION 1..15: note = Table B: HLA-DRB4*03:01NL HLA-DRB1*08:04L HLA-DRB1*11:04L HLA-DRB1*14:02L HLA-DRB1*04:10L HLA-DPA1*02:01-B1*13:01L HLA-DPA1*01:03-B1*02:01L
FVLTSHTVMPLSAPT

SEQ ID NO: 20153 - protein, 13 aa, Severe acute respiratory syndrome coronavirus 2
  REGION 1..13: note = Table B: HLA-DRB4*03:01NL HLA-DRB1*11:04L HLA-DRB1*09:01L HLA-DRB3*01:01L
LALYYPSARIVYT

SEQ ID NO: 20154 - protein, 11 aa, Severe acute respiratory syndrome coronavirus 2
  REGION 1..11: note = Table B: HLA-DRB4*03:01NL HLA-DQA1*03:01-B1*03:02L
TRVLSNLNLPG

SEQ ID NO: 20155 - protein, 12 aa, Severe acute respiratory syndrome coronavirus 2
  REGION 1..12: note = Table B: HLA-DRB4*03:01NL HLA-DRB1*08:04L HLA-DRB1*14:01L HLA-DRB1*08:01L HLA-DRB1*04:10L HLA-DRB1*12:01L HLA-DRB1*14:54L HLA-DRB1*14:17L HLA-DRB1*04:08L HLA-DRB1*08:03L
NTVYTKVDGVDV

SEQ ID NO: 20156 - protein, 11 aa, Severe acute respiratory syndrome coronavirus 2
  REGION 1..11: note = Table B: HLA-DRB4*03:01NL HLA-DRB1*14:17L HLA-DQA1*02:01-B1*03:03L
LVRDLPQGFSA

SEQ ID NO: 20157 - protein, 14 aa, Severe acute respiratory syndrome coronavirus 2
  REGION 1..14: note = Table B: HLA-DRB4*03:01NL HLA-DRB1*14:17L
GEVFNATRFASVYA

SEQ ID NO: 20158 - protein, 13 aa, Severe acute respiratory syndrome coronavirus 2
  REGION 1..13: note = Table B: HLA-DRB4*03:01NL HLA-DRB1*08:04L HLA-DRB1*14:02L HLA-DQA1*01:01-B1*05:01L HLA-DRB1*04:10L HLA-DRB1*14:17L HLA-DRB1*10:01L HLA-DRB1*08:03L
GGFNFSQILPDPS

SEQ ID NO: 20159 - protein, 11 aa, Severe acute respiratory syndrome coronavirus 2
  REGION 1..11: note = Table B: HLA-DRB4*03:01NL HLA-DQA1*01-B1*05L
KLQDVVNQNAQ

SEQ ID NO: 20160 - protein, 11 aa, Severe acute respiratory syndrome coronavirus 2
  REGION 1..11: note = Table B: HLA-DRB4*03:01NL HLA-DQA1*01:01-B1*05:01L HLA-DRB1*04:10L HLA-DQA1*05:05-B1*03:01L HLA-DRB1*14:17L HLA-DRB1*04:08L
TVYDPLQPELD

SEQ ID NO: 20161 - protein, 11 aa, Severe acute respiratory syndrome coronavirus 2
  REGION 1..11: note = Table B: HLA-DRB4*03:01NL HLA-DRB1*04:08L
SWFTALTQHGK

SEQ ID NO: 20162 - protein, 12 aa, Severe acute respiratory syndrome coronavirus 2
  REGION 1..12: note = Table B: HLA-DRB1*08:04L HLA-DRB1*14:54L
VPGFNEKTHVQL

SEQ ID NO: 20163 - protein, 15 aa, Severe acute respiratory syndrome coronavirus 2
  REGION 1..15: note = Table B: HLA-DRB1*08:04L HLA-DRB3*02:01L HLA-DQA1*05:05-B1*03:19L HLA-DQA1*05:05-B1*03:01L
LPVLQVRDVLVRGFG

SEQ ID NO: 20164 - protein, 13 aa, Severe acute respiratory syndrome coronavirus 2
  REGION 1..13: note = Table B: HLA-DRB1*08:04L HLA-DRB1*03:01L HLA-DRB1*11:03L HLA-DRB1*11:01L HLA-DRB1*08:03L
VEEVLSEARQHLK

SEQ ID NO: 20165 - protein, 12 aa, Severe acute respiratory syndrome coronavirus 2
  REGION 1..12: note = Table B: HLA-DRB1*08:04L HLA-DRB1*12:02L HLA-DRB1*14:54L HLA-DPA1*01:03-B1*104:01L
GIQYGRSGETLG

SEQ ID NO: 20166 - protein, 16 aa, Severe acute respiratory syndrome coronavirus 2
  REGION 1..16: note = Table B: HLA-DRB1*08:04L HLA-DRB1*10:01L
SGETLGVLVPHVGEIP

SEQ ID NO: 20167 - protein, 14 aa, Severe acute respiratory syndrome coronavirus 2
  REGION 1..14: note = Table B: HLA-DRB1*08:04L
LGVLVPHVGEIPVA

SEQ ID NO: 20168 - protein, 13 aa, Severe acute respiratory syndrome coronavirus 2
  REGION 1..13: note = Table B: HLA-DRB1*08:04L HLA-DRB1*14:54L HLA-DRB1*04:08L HLA-DRB1*08:03L
GHSYGADLKSFDL

SEQ ID NO: 20169 - protein, 15 aa, Severe acute respiratory syndrome coronavirus 2
  REGION 1..15: note = Table B: HLA-DRB1*08:04L HLA-DPA1*01:03-B1*02:01L
RELNGGAYTRYVDNN

SEQ ID NO: 20170 - protein, 17 aa, Severe acute respiratory syndrome coronavirus 2
  REGION 1..17: note = Table B: HLA-DRB1*08:04L HLA-DRB1*11:01L
IKDLLARAGKASCTLSE

SEQ ID NO: 20171 - protein, 14 aa, Severe acute respiratory syndrome coronavirus 2
  REGION 1..14: note = Table B: HLA-DRB1*08:04L HLA-DRB1*11:01L HLA-DRB1*16:01L
RGVYCCREHEHEIA

SEQ ID NO: 20172 - protein, 11 aa, Severe acute respiratory syndrome coronavirus 2
  REGION 1..11: note = Table B: HLA-DRB1*08:04L HLA-DPA1*01:03-B1*03:01L HLA-DRB1*11:03L HLA-DRB1*11:04L HLA-DRB1*14:02L HLA-DRB1*08:01L HLA-DQA1*01-B1*05L HLA-DPA1*01:03-B1*04:01L HLA-DRB1*04:10L HLA-DRB1*09:01L HLA-DPA1*02:01-B1*13:01L HLA-DRB1*07:01L
SIIKTIQPRVE

SEQ ID NO: 20173 - protein, 12 aa, Severe acute respiratory syndrome coronavirus 2
  REGION 1..12: note = Table B: HLA-DRB1*08:04L HLA-DRB3*02:01L HLA-DPA1*01:03-B1*03:01L HLA-DPA1*03:01-B1*04:02L HLA-DRB1*11:04L HLA-DRB1*14:02L HLA-DQA1*01:01-B1*05:01L HLA-DRB1*11:01L HLA-DQA1*01-B1*05L HLA-DPA1*01:03-B1*04:01L
  REGION 1..12: note = CONT. FROM ABOVE: HLA-DRB1*09:01L HLA-DPA1*01:03-B1*04:02L HLA-D PA1*02:01-B1*13:01L HLA-DPA1*01:03-B1*104:01L HLA-DRB1*07:01L HL A-DRB1*10:01L HLA-DRB1*08:03L
AYWVPRASANIG

SEQ ID NO: 20174 - protein, 11 aa, Severe acute respiratory syndrome coronavirus 2
  REGION 1..11: note = Table B: HLA-DRB1*08:04L HLA-DRB1*08:77L HLA-DPA1*03:01-B1*04:02L HLA-DRB1*11:04L HLA-DRB3*01:01L
NIVGDFKLNEE

SEQ ID NO: 20175 - protein, 16 aa, Severe acute respiratory syndrome coronavirus 2
  REGION 1..16: note = Table B: HLA-DRB1*08:04L HLA-DPA1*03:01-B1*04:02L HLA-DPA1*01:03-B1*04:02L HLA-DQA1*05:05-B1*03:01L HLA-DQA1*01:03-B1*06:01L
DYKAFKQIVESCGNFK

SEQ ID NO: 20176 - protein, 13 aa, Severe acute respiratory syndrome coronavirus 2
  REGION 1..13: note = Table B: HLA-DRB1*08:04L HLA-DRB3*02:01L HLA-DRB1*04:10L
ITILDGISQYSLR

SEQ ID NO: 20177 - protein, 16 aa, Severe acute respiratory syndrome coronavirus 2
  REGION 1..16: note = Table B: HLA-DRB1*08:04L HLA-DRB1*03:01L HLA-DRB1*11:02L
DAMMFTSDLATNNLVV

SEQ ID NO: 20178 - protein, 12 aa, Severe acute respiratory syndrome coronavirus 2
  REGION 1..12: note = Table B: HLA-DRB1*08:04L HLA-DRB3*01:01L HLA-DPA1*01:03-B1*02:01L
LTNIFGTVYEKL

SEQ ID NO: 20179 - protein, 14 aa, Severe acute respiratory syndrome coronavirus 2
  REGION 1..14: note = Table B: HLA-DRB1*08:04L HLA-DRB1*08:01L
VYEKLKPVLDWLEE

SEQ ID NO: 20180 - protein, 15 aa, Severe acute respiratory syndrome coronavirus 2
  REGION 1..15: note = Table B: HLA-DRB1*08:04L HLA-DPA1*01:03-B1*04:02L
IKESVQTFFKLVNKF

SEQ ID NO: 20181 - protein, 13 aa, Severe acute respiratory syndrome coronavirus 2
  REGION 1..13: note = Table B: HLA-DRB1*08:04L HLA-DRB1*04:08L
DSIIIGGAKLKAL

SEQ ID NO: 20182 - protein, 12 aa, Severe acute respiratory syndrome coronavirus 2
  REGION 1..12: note = Table B: HLA-DRB1*08:04L HLA-DRB1*07:01L HLA-DRB1*08:03L
ETFVTHSKGLYR

SEQ ID NO: 20183 - protein, 13 aa, Severe acute respiratory syndrome coronavirus 2
  REGION 1..13: note = Table B: HLA-DRB1*08:04L HLA-DRB1*08:03L
GLYRKCVKSREET

SEQ ID NO: 20184 - protein, 13 aa, Severe acute respiratory syndrome coronavirus 2
  REGION 1..13: note = Table B: HLA-DRB1*08:04L HLA-DRB1*11:02L HLA-DRB1*11:03L HLA-DRB1*11:04L HLA-DRB1*14:02L HLA-DQA1*01:01-B1*05:01L HLA-DPA1*01:03-B1*04:01L HLA-DRB1*09:01L HLA-DRB1*12:02L HLA-DRB3*01:01L HLA-DRB1*07:01L HLA-DRB1*10:01L HLA-DRB1*08:03L
VIEVQGYKSVNIT

SEQ ID NO: 20185 - protein, 14 aa, Severe acute respiratory syndrome coronavirus 2
  REGION 1..14: note = Table B: HLA-DRB1*08:04L
VQGYKSVNITFELD

SEQ ID NO: 20186 - protein, 12 aa, Severe acute respiratory syndrome coronavirus 2
  REGION 1..12: note = Table B: HLA-DRB1*08:04L HLA-DPA1*01:03-B1*03:01L
ITFELDERIDKV

SEQ ID NO: 20187 - protein, 17 aa, Severe acute respiratory syndrome coronavirus 2
  REGION 1..17: note = Table B: HLA-DRB1*08:04L HLA-DPA1*03:01-B1*04:02L HLA-DRB1*11:02L HLA-DRB1*11:01L HLA-DPA1*01:03-B1*04:02L HLA-DPA1*01:03-B1*104:01L
LDERIDKVLNEKCSAYT

SEQ ID NO: 20188 - protein, 14 aa, Severe acute respiratory syndrome coronavirus 2
  REGION 1..14: note = Table B: HLA-DRB1*08:04L HLA-DQA1*01:01-B1*05:01L HLA-DRB1*04:08L
VVADAVIKTLQPVS

SEQ ID NO: 20189 - protein, 13 aa, Severe acute respiratory syndrome coronavirus 2
  REGION 1..13: note = Table B: HLA-DRB1*08:04L
ESGEFKLASHMYC

SEQ ID NO: 20190 - protein, 12 aa, Severe acute respiratory syndrome coronavirus 2
  REGION 1..12: note = Table B: HLA-DRB1*08:04L HLA-DRB1*08:01L
GEFKLASHMYCS

SEQ ID NO: 20191 - protein, 13 aa, Severe acute respiratory syndrome coronavirus 2
  REGION 1..13: note = Table B: HLA-DRB1*08:04L HLA-DRB1*11:04L HLA-DRB5*01:01L HLA-DRB1*04:10L HLA-DRB3*01:01L HLA-DRB1*07:01L HLA-DRB1*04:08L HLA-DRB1*08:03L
EEEFEPSTQYEYG

SEQ ID NO: 20192 - protein, 13 aa, Severe acute respiratory syndrome coronavirus 2
  REGION 1..13: note = Table B: HLA-DRB1*08:04L HLA-DRB1*14:17L HLA-DRB1*04:08L
VQTIEVNSFSGYL

SEQ ID NO: 20193 - protein, 12 aa, Severe acute respiratory syndrome coronavirus 2
  REGION 1..12: note = Table B: HLA-DRB1*08:04L HLA-DRB1*11:03L HLA-DRB1*14:17L HLA-DRB1*07:01L
PTVVVNAANVYL

SEQ ID NO: 20194 - protein, 12 aa, Severe acute respiratory syndrome coronavirus 2
  REGION 1..12: note = Table B: HLA-DRB1*08:04L
LAVFDKNLYDKL

SEQ ID NO: 20195 - protein, 14 aa, Severe acute respiratory syndrome coronavirus 2
  REGION 1..14: note = Table B: HLA-DRB1*08:04L
DKNLYDKLVSSFLE

SEQ ID NO: 20196 - protein, 11 aa, Severe acute respiratory syndrome coronavirus 2
  REGION 1..11: note = Table B: HLA-DRB1*08:04L HLA-DRB1*11:04L HLA-DRB1*11:01L HLA-DPA1*02:01-B1*13:01L HLA-DPA1*01:03-B1*104:01L HLA-DQA1*05:05-B1*03:01L
TLEETKFLTEN

SEQ ID NO: 20197 - protein, 12 aa, Severe acute respiratory syndrome coronavirus 2
  REGION 1..12: note = Table B: HLA-DRB1*08:04L HLA-DRB3*02:01L HLA-DPA1*02:01-B1*13:01L HLA-DQA1*05:05-B1*03:01L
LEETKFLTENLL

SEQ ID NO: 20198 - protein, 14 aa, Severe acute respiratory syndrome coronavirus 2
  REGION 1..14: note = Table B: HLA-DRB1*08:04L HLA-DPA1*01:03-B1*02:01L
ETKFLTENLLLYID

SEQ ID NO: 20199 - protein, 12 aa, Severe acute respiratory syndrome coronavirus 2
  REGION 1..12: note = Table B: HLA-DRB1*08:04L HLA-DPA1*01:03-B1*03:01L HLA-DRB1*11:03L HLA-DRB1*14:02L HLA-DRB1*08:01L HLA-DRB1*12:02L
YIDINGNLHPDS

SEQ ID NO: 20200 - protein, 13 aa, Severe acute respiratory syndrome coronavirus 2
  REGION 1..13: note = Table B: HLA-DRB1*08:04L HLA-DRB1*15:03L
DITFLKKDAPYIV

SEQ ID NO: 20201 - protein, 16 aa, Severe acute respiratory syndrome coronavirus 2
  REGION 1..16: note = Table B: HLA-DRB1*08:04L HLA-DRB1*11:01L HLA-DPA1*02:01-B1*13:01L
GTTEMLAKALRKVPTD

SEQ ID NO: 20202 - protein, 13 aa, Severe acute respiratory syndrome coronavirus 2
  REGION 1..13: note = Table B: HLA-DRB1*08:04L HLA-DRB1*11:02L HLA-DRB1*11:01L HLA-DPA1*01:03-B1*104:01L
DNYITTYPGQGLN

SEQ ID NO: 20203 - protein, 12 aa, Severe acute respiratory syndrome coronavirus 2
  REGION 1..12: note = Table B: HLA-DRB1*08:04L HLA-DPA1*01:03-B1*03:01L HLA-DRB1*11:02L HLA-DRB1*11:01L HLA-DPA1*01:03-B1*04:01L HLA-DPA1*01:03-B1*04:02L HLA-DRB3*01:01L HLA-DPA1*02:01-B1*13:01L
YITTYPGQGLNG

SEQ ID NO: 20204 - protein, 16 aa, Severe acute respiratory syndrome coronavirus 2
  REGION 1..16: note = Table B: HLA-DRB1*08:04L HLA-DRB1*08:77L HLA-DRB3*02:01L HLA-DRB1*14:01L HLA-DRB1*11:03L HLA-DRB1*11:04L HLA-DRB1*14:02L HLA-DPA1*01:03-B1*04:01L HLA-DRB1*09:01L HLA-DRB1*12:02L HLA-DRB3*01:01L HLA-DPA1*01:03-B1*02:01L HLA-DRB1*07:01L
  REGION 1..16: note = CONT. FROM ABOVE: HLA-DRB1*10:01L HLA-DRB1*08:03L HLA-DRB1*15:01 L
YPGQGLNGYTVEEAKT

SEQ ID NO: 20205 - protein, 13 aa, Severe acute respiratory syndrome coronavirus 2
  REGION 1..13: note = Table B: HLA-DRB1*08:04L
IQEGVVDYGARFY

SEQ ID NO: 20206 - protein, 11 aa, Severe acute respiratory syndrome coronavirus 2
  REGION 1..11: note = Table B: HLA-DRB1*08:04L HLA-DRB3*02:01L HLA-DQA1*01:01-B1*05:01L HLA-DRB1*11:01L HLA-DPA1*02:01-B1*13:01L HLA-DPA1*01:03-B1*104:01L HLA-DQA1*05:05-B1*03:01L HLA-DQA1*01:03-B1*06:01L
  REGION 1..11: note = CONT. FROM ABOVE: HLA-DRB1*08:03L
FYTSKTTVASL

SEQ ID NO: 20207 - protein, 13 aa, Severe acute respiratory syndrome coronavirus 2
  REGION 1..13: note = Table B: HLA-DRB1*08:04L HLA-DQA1*01:01-B1*05:01L HLA-DQA1*05:05-B1*03:19L HLA-DRB1*04:08L
VTMPLGYVTHGLN

SEQ ID NO: 20208 - protein, 13 aa, Severe acute respiratory syndrome coronavirus 2
  REGION 1..13: note = Table B: HLA-DRB1*08:04L
MPLGYVTHGLNLE

SEQ ID NO: 20209 - protein, 17 aa, Severe acute respiratory syndrome coronavirus 2
  REGION 1..17: note = Table B: HLA-DRB1*08:04L HLA-DRB3*02:01L
VPATVSVSSPDAVTAYN

SEQ ID NO: 20210 - protein, 14 aa, Severe acute respiratory syndrome coronavirus 2
  REGION 1..14: note = Table B: HLA-DRB1*08:04L HLA-DRB1*12:01L
YKDWSYSGQSTQLG

SEQ ID NO: 20211 - protein, 13 aa, Severe acute respiratory syndrome coronavirus 2
  REGION 1..13: note = Table B: HLA-DRB1*08:04L HLA-DPA1*01:03-B1*03:01L HLA-DRB1*09:01L HLA-DQA1*05:05-B1*03:01L HLA-DRB1*07:01L HLA-DRB1*04:08L
DKSVYYTSNPTTF

SEQ ID NO: 20212 - protein, 12 aa, Severe acute respiratory syndrome coronavirus 2
  REGION 1..12: note = Table B: HLA-DRB1*08:04L HLA-DRB1*11:03L HLA-DRB1*11:04L HLA-DQA1*01:01-B1*05:01L HLA-DRB1*12:02L HLA-DRB3*01:01L HLA-DRB1*15:01L
GEVITFDNLKTL

SEQ ID NO: 20213 - protein, 12 aa, Severe acute respiratory syndrome coronavirus 2
  REGION 1..12: note = Table B: HLA-DRB1*08:04L
ITFDNLKTLLSL

SEQ ID NO: 20214 - protein, 13 aa, Severe acute respiratory syndrome coronavirus 2
  REGION 1..13: note = Table B: HLA-DRB1*08:04L
TIKVFTTVDNINL

SEQ ID NO: 20215 - protein, 12 aa, Severe acute respiratory syndrome coronavirus 2
  REGION 1..12: note = Table B: HLA-DRB1*08:04L HLA-DRB1*08:01L
DNINLHTQVVDM

SEQ ID NO: 20216 - protein, 12 aa, Severe acute respiratory syndrome coronavirus 2
  REGION 1..12: note = Table B: HLA-DRB1*08:04L HLA-DRB3*02:01L HLA-DRB1*08:01L HLA-DQA1*05:05-B1*03:19L HLA-DRB3*01:01L HLA-DRB1*08:03L
NINLHTQVVDMS

SEQ ID NO: 20217 - protein, 12 aa, Severe acute respiratory syndrome coronavirus 2
  REGION 1..12: note = Table B: HLA-DRB1*08:04L HLA-DRB3*02:01L HLA-DRB1*14:02L HLA-DQA1*05:05-B1*03:19L HLA-DPA1*01:03-B1*04:01L HLA-DPA1*01:03-B1*04:02L
INLHTQVVDMSM

SEQ ID NO: 20218 - protein, 13 aa, Severe acute respiratory syndrome coronavirus 2
  REGION 1..13: note = Table B: HLA-DRB1*08:04L
AFEYYHTTDPSFL

SEQ ID NO: 20219 - protein, 12 aa, Severe acute respiratory syndrome coronavirus 2
  REGION 1..12: note = Table B: HLA-DRB1*08:04L HLA-DRB1*04:10L HLA-DRB1*14:54L
EYYHTTDPSFLG

SEQ ID NO: 20220 - protein, 15 aa, Severe acute respiratory syndrome coronavirus 2
  REGION 1..15: note = Table B: HLA-DRB1*08:04L
LTSIKWADNNCYLAT

SEQ ID NO: 20221 - protein, 13 aa, Severe acute respiratory syndrome coronavirus 2
  REGION 1..13: note = Table B: HLA-DRB1*08:04L HLA-DRB1*14:01L HLA-DRB1*08:01L HLA-DPA1*03:01-B1*105:01L HLA-DQA1*01:03-B1*06:01L
ILAYCNKTVGELG

SEQ ID NO: 20222 - protein, 12 aa, Severe acute respiratory syndrome coronavirus 2
  REGION 1..12: note = Table B: HLA-DRB1*08:04L HLA-DPA1*01:03-B1*04:02L HLA-DRB1*07:01L HLA-DRB1*10:01L HLA-DRB1*04:08L
KYLVQQESPFVM

SEQ ID NO: 20223 - protein, 16 aa, Severe acute respiratory syndrome coronavirus 2
  REGION 1..16: note = Table B: HLA-DRB1*08:04L HLA-DRB1*14:02L
TGNYQCGHYKHITSKE

SEQ ID NO: 20224 - protein, 13 aa, Severe acute respiratory syndrome coronavirus 2
  REGION 1..13: note = Table B: HLA-DRB1*08:04L HLA-DRB1*04:10L HLA-DPA1*02:01-B1*13:01L HLA-DRB1*04:08L HLA-DRB1*08:03L
TTTIKPVTYKLDG

SEQ ID NO: 20225 - protein, 18 aa, Severe acute respiratory syndrome coronavirus 2
  REGION 1..18: note = Table B: HLA-DRB1*08:04L HLA-DPA1*01:03-B1*03:01L HLA-DPA1*02:01-B1*13:01L
IKPVTYKLDGVVCTEIDP

SEQ ID NO: 20226 - protein, 15 aa, Severe acute respiratory syndrome coronavirus 2
  REGION 1..15: note = Table B: HLA-DRB1*08:04L HLA-DPA1*03:01-B1*04:02L HLA-DPA1*01:03-B1*04:02L
LDGVVCTEIDPKLDN

SEQ ID NO: 20227 - protein, 15 aa, Severe acute respiratory syndrome coronavirus 2
  REGION 1..15: note = Table B: HLA-DRB1*08:04L
NFKFVCDNIKFADDL

SEQ ID NO: 20228 - protein, 15 aa, Severe acute respiratory syndrome coronavirus 2
  REGION 1..15: note = Table B: HLA-DRB1*08:04L HLA-DPA1*02:01-B1*13:01L
FKFVCDNIKFADDLN

SEQ ID NO: 20229 - protein, 14 aa, Severe acute respiratory syndrome coronavirus 2
  REGION 1..14: note = Table B: HLA-DRB1*08:04L HLA-DPA1*01:03-B1*02:01L
RELKVTFFPDLNGD

SEQ ID NO: 20230 - protein, 13 aa, Severe acute respiratory syndrome coronavirus 2
  REGION 1..13: note = Table B: HLA-DRB1*08:04L HLA-DRB1*08:03L HLA-DRB1*15:03L
YKHYTPSFKKGAK

SEQ ID NO: 20231 - protein, 14 aa, Severe acute respiratory syndrome coronavirus 2
  REGION 1..14: note = Table B: HLA-DRB1*08:04L HLA-DRB1*08:01L HLA-DRB1*04:08L
LWSTKPVETSNSFD

SEQ ID NO: 20232 - protein, 13 aa, Severe acute respiratory syndrome coronavirus 2
  REGION 1..13: note = Table B: HLA-DRB1*08:04L HLA-DRB1*08:01L HLA-DPA1*01:03-B1*04:01L HLA-DPA1*01:03-B1*04:02L HLA-DRB3*01:01L HLA-DPA1*01:03-B1*104:01L HLA-DRB1*08:03L
FDVLKSEDAQGMD

SEQ ID NO: 20233 - protein, 14 aa, Severe acute respiratory syndrome coronavirus 2
  REGION 1..14: note = Table B: HLA-DRB1*08:04L HLA-DPA1*03:01-B1*105:01L HLA-DRB1*15:03L
KDVLECNVKTTEVV

SEQ ID NO: 20234 - protein, 15 aa, Severe acute respiratory syndrome coronavirus 2
  REGION 1..15: note = Table B: HLA-DRB1*08:04L
TTEVVGDIILKPANN

SEQ ID NO: 20235 - protein, 12 aa, Severe acute respiratory syndrome coronavirus 2
  REGION 1..12: note = Table B: HLA-DRB1*08:04L HLA-DRB1*11:03L HLA-DRB1*11:04L HLA-DRB1*04:10L HLA-DRB1*12:02L HLA-DQA1*05:05-B1*03:01L HLA-DRB1*04:08L HLA-DRB1*08:03L
GDIILKPANNSL

SEQ ID NO: 20236 - protein, 14 aa, Severe acute respiratory syndrome coronavirus 2
  REGION 1..14: note = Table B: HLA-DRB1*08:04L HLA-DRB3*02:01L
NNSLKITEEVGHTD

SEQ ID NO: 20237 - protein, 14 aa, Severe acute respiratory syndrome coronavirus 2
  REGION 1..14: note = Table B: HLA-DRB1*08:04L HLA-DRB1*08:01L HLA-DPA1*01:03-B1*04:02L HLA-DPA1*01:02-B1*04:01L
HTDLMAAYVDNSSL

SEQ ID NO: 20238 - protein, 15 aa, Severe acute respiratory syndrome coronavirus 2
  REGION 1..15: note = Table B: HLA-DRB1*08:04L HLA-DPA1*01:03-B1*104:01L
NSRIKASMPTTIAKN

SEQ ID NO: 20239 - protein, 14 aa, Severe acute respiratory syndrome coronavirus 2
  REGION 1..14: note = Table B: HLA-DRB1*08:04L HLA-DRB1*08:77L HLA-DRB1*11:03L HLA-DRB1*09:01L HLA-DRB3*01:01L HLA-DRB1*07:01L HLA-DRB1*04:08L
MPTTIAKNTVKSVG

SEQ ID NO: 20240 - protein, 14 aa, Severe acute respiratory syndrome coronavirus 2
  REGION 1..14: note = Table B: HLA-DRB1*08:04L HLA-DPA1*01:03-B1*02:01L HLA-DPA1*01:03-B1*104:01L
FNYLKSPNFSKLIN

SEQ ID NO: 20241 - protein, 13 aa, Severe acute respiratory syndrome coronavirus 2
  REGION 1..13: note = Table B: HLA-DRB1*08:04L HLA-DRB1*08:01L HLA-DRB1*11:01L HLA-DQA1*01-B1*05L HLA-DQA1*05:01-B1*02:01L HLA-DPA1*02:01-B1*13:01L HLA-DPA1*01:03-B1*104:01L HLA-DQA1*01:03-B1*06:01L
SFKWDLTAFGLVA

SEQ ID NO: 20242 - protein, 12 aa, Severe acute respiratory syndrome coronavirus 2
  REGION 1..12: note = Table B: HLA-DRB1*08:04L HLA-DRB1*04:08L
YFAVHFISNSWL

SEQ ID NO: 20243 - protein, 12 aa, Severe acute respiratory syndrome coronavirus 2
  REGION 1..12: note = Table B: HLA-DRB1*08:04L HLA-DRB1*12:01L
APISAMVRMYIF

SEQ ID NO: 20244 - protein, 15 aa, Severe acute respiratory syndrome coronavirus 2
  REGION 1..15: note = Table B: HLA-DRB1*08:04L
WKSYVHVVDGCNSST

SEQ ID NO: 20245 - protein, 13 aa, Severe acute respiratory syndrome coronavirus 2
  REGION 1..13: note = Table B: HLA-DRB1*08:04L HLA-DRB1*11:03L HLA-DRB3*01:01L
ISDEVARDLSLQF

SEQ ID NO: 20246 - protein, 14 aa, Severe acute respiratory syndrome coronavirus 2
  REGION 1..14: note = Table B: HLA-DRB1*08:04L
IHLYFDKAGQKTYE

SEQ ID NO: 20247 - protein, 16 aa, Severe acute respiratory syndrome coronavirus 2
  REGION 1..16: note = Table B: HLA-DRB1*08:04L HLA-DPA1*01:03-B1*03:01L
AGQKTYERHSLSHFVN

SEQ ID NO: 20248 - protein, 18 aa, Severe acute respiratory syndrome coronavirus 2
  REGION 1..18: note = Table B: HLA-DRB1*08:04L HLA-DPA1*03:01-B1*04:02L HLA-DRB1*14:02L HLA-DQA1*05:05-B1*03:19L HLA-DQA1*05:01-B1*02:01L HLA-DPA1*01:03-B1*04:02L HLA-DPA1*01:03-B1*104:01L
GQKTYERHSLSHFVNLDN

SEQ ID NO: 20249 - protein, 14 aa, Severe acute respiratory syndrome coronavirus 2
  REGION 1..14: note = Table B: HLA-DRB1*08:04L
DSAEVAVKMFDAYV

SEQ ID NO: 20250 - protein, 14 aa, Severe acute respiratory syndrome coronavirus 2
  REGION 1..14: note = Table B: HLA-DRB1*08:04L
AEVAVKMFDAYVNT

SEQ ID NO: 20251 - protein, 14 aa, Severe acute respiratory syndrome coronavirus 2
  REGION 1..14: note = Table B: HLA-DRB1*08:04L HLA-DRB1*15:01L
VAVKMFDAYVNTFS

SEQ ID NO: 20252 - protein, 13 aa, Severe acute respiratory syndrome coronavirus 2
  REGION 1..13: note = Table B: HLA-DRB1*08:04L HLA-DRB1*08:01L HLA-DPA1*01:03-B1*04:02L HLA-DPA1*01:03-B1*104:01L
FDAYVNTFSSTFN

SEQ ID NO: 20253 - protein, 13 aa, Severe acute respiratory syndrome coronavirus 2
  REGION 1..13: note = Table B: HLA-DRB1*08:04L HLA-DRB1*10:01L
VATAEAELAKNVS

SEQ ID NO: 20254 - protein, 12 aa, Severe acute respiratory syndrome coronavirus 2
  REGION 1..12: note = Table B: HLA-DRB1*08:04L HLA-DRB1*14:54L
LSTFISAARQGF

SEQ ID NO: 20255 - protein, 15 aa, Severe acute respiratory syndrome coronavirus 2
  REGION 1..15: note = Table B: HLA-DRB1*08:04L HLA-DRB1*14:01L
VDSDVETKDVVECLK

SEQ ID NO: 20256 - protein, 13 aa, Severe acute respiratory syndrome coronavirus 2
  REGION 1..13: note = Table B: HLA-DRB1*08:04L HLA-DRB1*11:04L HLA-DRB1*11:01L HLA-DRB1*04:08L
KDVVECLKLSHQS

SEQ ID NO: 20257 - protein, 13 aa, Severe acute respiratory syndrome coronavirus 2
  REGION 1..13: note = Table B: HLA-DRB1*08:04L HLA-DRB1*14:01L HLA-DRB1*08:01L HLA-DPA1*03:01-B1*105:01L HLA-DRB1*04:08L
DVVECLKLSHQSD

SEQ ID NO: 20258 - protein, 16 aa, Severe acute respiratory syndrome coronavirus 2
  REGION 1..16: note = Table B: HLA-DRB1*08:04L
INAQVAKSHNIALIWN

SEQ ID NO: 20259 - protein, 13 aa, Severe acute respiratory syndrome coronavirus 2
  REGION 1..13: note = Table B: HLA-DRB1*08:04L HLA-DPA1*01:03-B1*02:01L
ALIWNVKDFMSLS

SEQ ID NO: 20260 - protein, 14 aa, Severe acute respiratory syndrome coronavirus 2
  REGION 1..14: note = Table B: HLA-DRB1*08:04L HLA-DQA1*05:05-B1*03:01L
VVNVVTTKIALKGG

SEQ ID NO: 20261 - protein, 15 aa, Severe acute respiratory syndrome coronavirus 2
  REGION 1..15: note = Table B: HLA-DRB1*08:04L
VNVVTTKIALKGGKI

SEQ ID NO: 20262 - protein, 13 aa, Severe acute respiratory syndrome coronavirus 2
  REGION 1..13: note = Table B: HLA-DRB1*08:04L HLA-DQA1*05:05-B1*03:01L
VAAIFYLITPVHV

SEQ ID NO: 20263 - protein, 13 aa, Severe acute respiratory syndrome coronavirus 2
  REGION 1..13: note = Table B: HLA-DRB1*08:04L HLA-DPA1*02:01-B1*13:01L HLA-DPA1*01:02-B1*04:01L
SSEIIGYKAIDGG

SEQ ID NO: 20264 - protein, 13 aa, Severe acute respiratory syndrome coronavirus 2
  REGION 1..13: note = Table B: HLA-DRB1*08:04L HLA-DRB1*11:02L HLA-DRB1*11:03L HLA-DRB1*14:17L HLA-DRB1*04:08L
DFDTWFSQRGGSY

SEQ ID NO: 20265 - protein, 12 aa, Severe acute respiratory syndrome coronavirus 2
  REGION 1..12: note = Table B: HLA-DRB1*08:04L HLA-DPA1*03:01-B1*04:02L HLA-DRB1*14:01L HLA-DRB1*08:01L HLA-DRB1*12:01L HLA-DRB1*04:08L
GDFLHFLPRVFS

SEQ ID NO: 20266 - protein, 12 aa, Severe acute respiratory syndrome coronavirus 2
  REGION 1..12: note = Table B: HLA-DRB1*08:04L HLA-DRB1*11:04L HLA-DRB1*08:01L HLA-DRB1*11:01L HLA-DRB1*04:08L
DFLHFLPRVFSA

SEQ ID NO: 20267 - protein, 15 aa, Severe acute respiratory syndrome coronavirus 2
  REGION 1..15: note = Table B: HLA-DRB1*08:04L
GNICYTPSKLIEYTD

SEQ ID NO: 20268 - protein, 14 aa, Severe acute respiratory syndrome coronavirus 2
  REGION 1..14: note = Table B: HLA-DRB1*08:04L HLA-DPA1*01:03-B1*03:01L HLA-DRB1*14:02L HLA-DPA1*01:03-B1*04:01L HLA-DPA1*01:03-B1*02:01L HLA-DPA1*01:03-B1*104:01L HLA-DRB1*07:01L HLA-DRB1*08:03L
IIQFPNTYLEGSVR

SEQ ID NO: 20269 - protein, 14 aa, Severe acute respiratory syndrome coronavirus 2
  REGION 1..14: note = Table B: HLA-DRB1*08:04L HLA-DRB3*02:01L HLA-DRB1*14:01L HLA-DRB1*04:10L HLA-DRB1*09:01L HLA-DRB1*07:01L
FPNTYLEGSVRVVT

SEQ ID NO: 20270 - protein, 13 aa, Severe acute respiratory syndrome coronavirus 2
  REGION 1..13: note = Table B: HLA-DRB1*08:04L HLA-DQA1*01:01-B1*05:01L HLA-DRB1*08:01L HLA-DRB1*09:01L HLA-DRB3*01:01L HLA-DPA1*01:03-B1*02:01L HLA-DRB1*07:01L HLA-DRB1*08:03L
GSVRVVTTFDSEY

SEQ ID NO: 20271 - protein, 13 aa, Severe acute respiratory syndrome coronavirus 2
  REGION 1..13: note = Table B: HLA-DRB1*08:04L HLA-DRB1*04:08L
LNNDYYRSLPGVF

SEQ ID NO: 20272 - protein, 12 aa, Severe acute respiratory syndrome coronavirus 2
  REGION 1..12: note = Table B: HLA-DRB1*08:04L HLA-DPA1*01:02-B1*04:01L
YFSGAMDTTSYR

SEQ ID NO: 20273 - protein, 13 aa, Severe acute respiratory syndrome coronavirus 2
  REGION 1..13: note = Table B: HLA-DRB1*08:04L HLA-DRB3*02:01L HLA-DRB1*11:03L HLA-DRB1*12:02L HLA-DPA1*02:01-B1*13:01L HLA-DRB1*07:01L
FSGAMDTTSYREA

SEQ ID NO: 20274 - protein, 13 aa, Severe acute respiratory syndrome coronavirus 2
  REGION 1..13: note = Table B: HLA-DRB1*08:04L HLA-DRB1*08:01L
SGAMDTTSYREAA

SEQ ID NO: 20275 - protein, 14 aa, Severe acute respiratory syndrome coronavirus 2
  REGION 1..14: note = Table B: HLA-DRB1*08:04L HLA-DRB1*11:03L HLA-DRB1*11:04L HLA-DQA1*01:01-B1*05:01L
GSDVLYQPPQTSIT

SEQ ID NO: 20276 - protein, 13 aa, Severe acute respiratory syndrome coronavirus 2
  REGION 1..13: note = Table B: HLA-DRB1*08:04L HLA-DRB1*11:04L HLA-DRB1*11:01L
DDVVYCPRHVICT

SEQ ID NO: 20277 - protein, 13 aa, Severe acute respiratory syndrome coronavirus 2
  REGION 1..13: note = Table B: HLA-DRB1*08:04L HLA-DRB1*11:01L HLA-DRB3*01:01L
HNFLVQAGNVQLR

SEQ ID NO: 20278 - protein, 16 aa, Severe acute respiratory syndrome coronavirus 2
  REGION 1..16: note = Table B: HLA-DRB1*08:04L HLA-DRB1*14:02L HLA-DRB1*07:01L HLA-DRB1*08:03L
EGNFYGPFVDRQTAQA

SEQ ID NO: 20279 - protein, 13 aa, Severe acute respiratory syndrome coronavirus 2
  REGION 1..13: note = Table B: HLA-DRB1*08:04L
YGPFVDRQTAQAA

SEQ ID NO: 20280 - protein, 15 aa, Severe acute respiratory syndrome coronavirus 2
  REGION 1..15: note = Table B: HLA-DRB1*08:04L HLA-DPA1*01:03-B1*03:01L HLA-DPA1*01:03-B1*04:01L HLA-DPA1*01:03-B1*04:02L HLA-DPA1*02:01-B1*13:01L
AAVINGDRWFLNRFT

SEQ ID NO: 20281 - protein, 14 aa, Severe acute respiratory syndrome coronavirus 2
  REGION 1..14: note = Table B: HLA-DRB1*08:04L HLA-DRB1*14:02L HLA-DRB1*08:01L
WFLNRFTTTLNDFN

SEQ ID NO: 20282 - protein, 14 aa, Severe acute respiratory syndrome coronavirus 2
  REGION 1..14: note = Table B: HLA-DRB1*08:04L HLA-DPA1*01:03-B1*02:01L HLA-DRB1*08:02L
TLVYKVYYGNALDQ

SEQ ID NO: 20283 - protein, 13 aa, Severe acute respiratory syndrome coronavirus 2
  REGION 1..13: note = Table B: HLA-DRB1*08:04L HLA-DPA1*01:03-B1*04:01L HLA-DPA1*01:03-B1*04:02L HLA-DRB1*12:02L HLA-DRB1*14:54L HLA-DPA1*01:03-B1*104:01L
VYKVYYGNALDQA

SEQ ID NO: 20284 - protein, 12 aa, Severe acute respiratory syndrome coronavirus 2
  REGION 1..12: note = Table B: HLA-DRB1*08:04L HLA-DRB1*08:01L HLA-DRB1*12:02L HLA-DRB1*14:54L
TTVMFLARGIVF

SEQ ID NO: 20285 - protein, 15 aa, Severe acute respiratory syndrome coronavirus 2
  REGION 1..15: note = Table B: HLA-DRB1*08:04L HLA-DPA1*03:01-B1*04:02L HLA-DPA1*01:03-B1*04:02L HLA-DPA1*01:03-B1*02:01L HLA-DPA1*01:02-B1*04:01L HLA-DQA1*01:03-B1*06:01L
RLTLGVYDYLVSTQE

SEQ ID NO: 20286 - protein, 11 aa, Severe acute respiratory syndrome coronavirus 2
  REGION 1..11: note = Table B: HLA-DRB1*08:04L HLA-DRB1*14:01L
FKLNIKLLGVG

SEQ ID NO: 20287 - protein, 13 aa, Severe acute respiratory syndrome coronavirus 2
  REGION 1..13: note = Table B: HLA-DRB1*08:04L HLA-DPA1*01:03-B1*03:01L HLA-DQA1*05:05-B1*03:19L HLA-DRB1*04:10L HLA-DRB1*10:01L
TSVVLLSVLQQLR

SEQ ID NO: 20288 - protein, 14 aa, Severe acute respiratory syndrome coronavirus 2
  REGION 1..14: note = Table B: HLA-DRB1*08:04L
SVVLLSVLQQLRVE

SEQ ID NO: 20289 - protein, 15 aa, Severe acute respiratory syndrome coronavirus 2
  REGION 1..15: note = Table B: HLA-DRB1*08:04L HLA-DRB1*03:01L HLA-DRB1*11:02L HLA-DRB1*09:01L HLA-DPA1*01:03-B1*04:02L HLA-DPA1*01:03-B1*104:01L HLA-DRB1*08:02L HLA-DRB1*08:03L
LQQLRVESSSKLWAQ

SEQ ID NO: 20290 - protein, 13 aa, Severe acute respiratory syndrome coronavirus 2
  REGION 1..13: note = Table B: HLA-DRB1*08:04L HLA-DPA1*03:01-B1*105:01L
SKLWAQCVQLHND

SEQ ID NO: 20291 - protein, 14 aa, Severe acute respiratory syndrome coronavirus 2
  REGION 1..14: note = Table B: HLA-DRB1*08:04L
KLWAQCVQLHNDIL

SEQ ID NO: 20292 - protein, 14 aa, Severe acute respiratory syndrome coronavirus 2
  REGION 1..14: note = Table B: HLA-DRB1*08:04L
EMLDNRATLQAIAS

SEQ ID NO: 20293 - protein, 14 aa, Severe acute respiratory syndrome coronavirus 2
  REGION 1..14: note = Table B: HLA-DRB1*08:04L
KSLNVAKSEFDRDA

SEQ ID NO: 20294 - protein, 14 aa, Severe acute respiratory syndrome coronavirus 2
  REGION 1..14: note = Table B: HLA-DRB1*08:04L HLA-DRB1*08:03L HLA-DRB1*15:01L
QRKLEKMADQAMTQ

SEQ ID NO: 20295 - protein, 12 aa, Severe acute respiratory syndrome coronavirus 2
  REGION 1..12: note = Table B: HLA-DRB1*08:04L HLA-DRB1*14:01L HLA-DRB1*16:01L HLA-DRB1*15:03L
FTMLRKLDNDAL

SEQ ID NO: 20296 - protein, 13 aa, Severe acute respiratory syndrome coronavirus 2
  REGION 1..13: note = Table B: HLA-DRB1*08:04L HLA-DRB1*08:77L HLA-DPA1*01:03-B1*03:01L HLA-DRB1*11:03L HLA-DPA1*02:01-B1*13:01L HLA-DRB1*07:01L HLA-DRB1*10:01L
DALNNIINNARDG

SEQ ID NO: 20297 - protein, 15 aa, Severe acute respiratory syndrome coronavirus 2
  REGION 1..15: note = Table B: HLA-DRB1*08:04L
IIPLTTAAKLMVVIP

SEQ ID NO: 20298 - protein, 12 aa, Severe acute respiratory syndrome coronavirus 2
  REGION 1..12: note = Table B: HLA-DRB1*08:04L HLA-DRB3*02:01L HLA-DRB1*11:03L HLA-DRB1*11:04L HLA-DRB1*12:02L HLA-DRB3*01:01L
MVVIPDYNTYKN

SEQ ID NO: 20299 - protein, 12 aa, Severe acute respiratory syndrome coronavirus 2
  REGION 1..12: note = Table B: HLA-DRB1*08:04L HLA-DRB1*11:03L
VTALRANSAVKL

SEQ ID NO: 20300 - protein, 13 aa, Severe acute respiratory syndrome coronavirus 2
  REGION 1..13: note = Table B: HLA-DRB1*08:04L HLA-DRB1*11:04L HLA-DQA1*05:05-B1*03:01L HLA-DRB1*10:01L HLA-DRB1*08:03L
NSAVKLQNNELSP

SEQ ID NO: 20301 - protein, 13 aa, Severe acute respiratory syndrome coronavirus 2
  REGION 1..13: note = Table B: HLA-DRB1*08:04L HLA-DPA1*03:01-B1*04:02L HLA-DRB1*11:03L HLA-DRB1*10:01L HLA-DRB1*15:01L
DNALAYYNTTKGG

SEQ ID NO: 20302 - protein, 11 aa, Severe acute respiratory syndrome coronavirus 2
  REGION 1..11: note = Table B: HLA-DRB1*08:04L HLA-DRB1*11:04L HLA-DRB1*09:01L HLA-DRB1*12:02L HLA-DRB3*01:01L HLA-DRB1*14:54L HLA-DPA1*01:03-B1*104:01L
YYNTTKGGRFV

SEQ ID NO: 20303 - protein, 14 aa, Severe acute respiratory syndrome coronavirus 2
  REGION 1..14: note = Table B: HLA-DRB1*08:04L
GGRFVLALLSDLQD

SEQ ID NO: 20304 - protein, 14 aa, Severe acute respiratory syndrome coronavirus 2
  REGION 1..14: note = Table B: HLA-DRB1*08:04L HLA-DPA1*01:03-B1*03:01L HLA-DQA1*01-B1*05L HLA-DQA1*05:01-B1*02:01L HLA-DRB3*01:01L HLA-DQA1*05:05-B1*03:01L
DLQDLKWARFPKSD

SEQ ID NO: 20305 - protein, 12 aa, Severe acute respiratory syndrome coronavirus 2
  REGION 1..12: note = Table B: HLA-DRB1*08:04L HLA-DRB3*01:01L HLA-DQA1*05:05-B1*03:01L
YFIKGLNNLNRG

SEQ ID NO: 20306 - protein, 13 aa, Severe acute respiratory syndrome coronavirus 2
  REGION 1..13: note = Table B: HLA-DRB1*08:04L
VLGSLAATVRLQA

SEQ ID NO: 20307 - protein, 14 aa, Severe acute respiratory syndrome coronavirus 2
  REGION 1..14: note = Table B: HLA-DRB1*08:04L
VLSFCAFAVDAAKA

SEQ ID NO: 20308 - protein, 17 aa, Severe acute respiratory syndrome coronavirus 2
  REGION 1..17: note = Table B: HLA-DRB1*08:04L HLA-DRB1*11:04L HLA-DPA1*01:03-B1*02:01L
VDAAKAYKDYLASGGQP

SEQ ID NO: 20309 - protein, 13 aa, Severe acute respiratory syndrome coronavirus 2
  REGION 1..13: note = Table B: HLA-DRB1*08:04L HLA-DRB1*14:01L
GQPITNCVKMLCT

SEQ ID NO: 20310 - protein, 13 aa, Severe acute respiratory syndrome coronavirus 2
  REGION 1..13: note = Table B: HLA-DRB1*08:04L HLA-DRB1*08:01L
DPVGFTLKNTVCT

SEQ ID NO: 20311 - protein, 13 aa, Severe acute respiratory syndrome coronavirus 2
  REGION 1..13: note = Table B: HLA-DRB1*08:04L HLA-DRB1*11:03L HLA-DRB1*12:02L
YRAFDIYNDKVAG

SEQ ID NO: 20312 - protein, 14 aa, Severe acute respiratory syndrome coronavirus 2
  REGION 1..14: note = Table B: HLA-DRB1*08:04L
RHTFSNYQHEETIY

SEQ ID NO: 20313 - protein, 13 aa, Severe acute respiratory syndrome coronavirus 2
  REGION 1..13: note = Table B: HLA-DRB1*08:04L HLA-DRB1*08:03L
FFKFRIDGDMVPH

SEQ ID NO: 20314 - protein, 12 aa, Severe acute respiratory syndrome coronavirus 2
  REGION 1..12: note = Table B: HLA-DRB1*08:04L HLA-DPA1*01:03-B1*03:01L HLA-DRB1*03:01L HLA-DRB1*14:02L HLA-DPA1*03:01-B1*105:01L
FRIDGDMVPHIS

SEQ ID NO: 20315 - protein, 17 aa, Severe acute respiratory syndrome coronavirus 2
  REGION 1..17: note = Table B: HLA-DRB1*08:04L
DTLKEILVTYNCCDDDY

SEQ ID NO: 20316 - protein, 12 aa, Severe acute respiratory syndrome coronavirus 2
  REGION 1..12: note = Table B: HLA-DRB1*08:04L HLA-DRB1*08:01L HLA-DRB1*08:03L
DDYFNKKDWYDF

SEQ ID NO: 20317 - protein, 13 aa, Severe acute respiratory syndrome coronavirus 2
  REGION 1..13: note = Table B: HLA-DRB1*08:04L HLA-DRB1*08:01L
DYFNKKDWYDFVE

SEQ ID NO: 20318 - protein, 13 aa, Severe acute respiratory syndrome coronavirus 2
  REGION 1..13: note = Table B: HLA-DRB1*08:04L HLA-DRB1*11:03L HLA-DPA1*01:03-B1*04:01L HLA-DRB1*09:01L HLA-DPA1*01:03-B1*104:01L HLA-DRB1*07:01L
DWYDFVENPDILR

SEQ ID NO: 20319 - protein, 14 aa, Severe acute respiratory syndrome coronavirus 2
  REGION 1..14: note = Table B: HLA-DRB1*08:04L
WYDFVENPDILRVY

SEQ ID NO: 20320 - protein, 14 aa, Severe acute respiratory syndrome coronavirus 2
  REGION 1..14: note = Table B: HLA-DRB1*08:04L
YDFVENPDILRVYA

SEQ ID NO: 20321 - protein, 14 aa, Severe acute respiratory syndrome coronavirus 2
  REGION 1..14: note = Table B: HLA-DRB1*08:04L HLA-DRB1*04:08L
DFVENPDILRVYAN

SEQ ID NO: 20322 - protein, 15 aa, Severe acute respiratory syndrome coronavirus 2
  REGION 1..15: note = Table B: HLA-DRB1*08:04L HLA-DRB1*08:01L
TVQFCDAMRNAGIVG

SEQ ID NO: 20323 - protein, 14 aa, Severe acute respiratory syndrome coronavirus 2
  REGION 1..14: note = Table B: HLA-DRB1*08:04L HLA-DPA1*01:03-B1*04:01L HLA-DPA1*01:03-B1*04:02L HLA-DPA1*02:01-B1*13:01L HLA-DPA1*01:03-B1*104:01L
FGDFIQTTPGSGVP

SEQ ID NO: 20324 - protein, 12 aa, Severe acute respiratory syndrome coronavirus 2
  REGION 1..12: note = Table B: HLA-DRB1*08:04L HLA-DRB3*01:01L
ESHVDTDLTKPY

SEQ ID NO: 20325 - protein, 13 aa, Severe acute respiratory syndrome coronavirus 2
  REGION 1..13: note = Table B: HLA-DRB1*08:04L HLA-DRB1*13:01L
SHVDTDLTKPYIK

SEQ ID NO: 20326 - protein, 16 aa, Severe acute respiratory syndrome coronavirus 2
  REGION 1..16: note = Table B: HLA-DRB1*08:04L HLA-DRB1*13:01L
TEERLKLFDRYFKYWD

SEQ ID NO: 20327 - protein, 16 aa, Severe acute respiratory syndrome coronavirus 2
  REGION 1..16: note = Table B: HLA-DRB1*08:04L HLA-DRB1*14:01L HLA-DRB1*08:01L HLA-DRB1*15:03L
FPPTSFGPLVRKIFVD

SEQ ID NO: 20328 - protein, 13 aa, Severe acute respiratory syndrome coronavirus 2
  REGION 1..13: note = Table B: HLA-DRB1*08:04L HLA-DRB1*08:77L HLA-DRB3*02:01L HLA-DPA1*01:03-B1*03:01L HLA-DRB1*03:01L HLA-DRB1*11:04L HLA-DRB1*08:01L
VRKIFVDGVPFVV

SEQ ID NO: 20329 - protein, 11 aa, Severe acute respiratory syndrome coronavirus 2
  REGION 1..11: note = Table B: HLA-DRB1*08:04L HLA-DPA1*01:03-B1*03:01L HLA-DRB1*11:04L HLA-DRB1*12:02L HLA-DRB3*01:01L HLA-DRB1*10:01L
LVYAADPAMHA

SEQ ID NO: 20330 - protein, 12 aa, Severe acute respiratory syndrome coronavirus 2
  REGION 1..12: note = Table B: HLA-DRB1*08:04L HLA-DRB1*09:01L HLA-DRB1*12:02L
NVAFQTVKPGNF

SEQ ID NO: 20331 - protein, 12 aa, Severe acute respiratory syndrome coronavirus 2
  REGION 1..12: note = Table B: HLA-DRB1*08:04L HLA-DRB1*11:01L HLA-DRB5*01:01L HLA-DRB1*09:01L HLA-DRB3*01:01L HLA-DRB1*08:03L
VAFQTVKPGNFN

SEQ ID NO: 20332 - protein, 16 aa, Severe acute respiratory syndrome coronavirus 2
  REGION 1..16: note = Table B: HLA-DRB1*08:04L HLA-DPA1*01:03-B1*04:01L
PGNFNKDFYDFAVSKG

SEQ ID NO: 20333 - protein, 13 aa, Severe acute respiratory syndrome coronavirus 2
  REGION 1..13: note = Table B: HLA-DRB1*08:04L HLA-DRB1*04:08L
NAAISDYDYYRYN

SEQ ID NO: 20334 - protein, 14 aa, Severe acute respiratory syndrome coronavirus 2
  REGION 1..14: note = Table B: HLA-DRB1*08:04L
VVEVVDKYFDCYDG

SEQ ID NO: 20335 - protein, 11 aa, Severe acute respiratory syndrome coronavirus 2
  REGION 1..11: note = Table B: HLA-DRB1*08:04L HLA-DRB1*08:03L
KYAISAKNRAR

SEQ ID NO: 20336 - protein, 11 aa, Severe acute respiratory syndrome coronavirus 2
  REGION 1..11: note = Table B: HLA-DRB1*08:04L HLA-DRB1*11:03L HLA-DRB1*15:03L
YAISAKNRART

SEQ ID NO: 20337 - protein, 14 aa, Severe acute respiratory syndrome coronavirus 2
  REGION 1..14: note = Table B: HLA-DRB1*08:04L HLA-DRB1*11:04L HLA-DRB1*08:01L
GVSICSTMTNRQFH

SEQ ID NO: 20338 - protein, 12 aa, Severe acute respiratory syndrome coronavirus 2
  REGION 1..12: note = Table B: HLA-DRB1*08:04L
TVVIGTSKFYGG

SEQ ID NO: 20339 - protein, 12 aa, Severe acute respiratory syndrome coronavirus 2
  REGION 1..12: note = Table B: HLA-DRB1*08:04L HLA-DRB1*14:01L HLA-DRB1*08:01L
GGWHNMLKTVYS

SEQ ID NO: 20340 - protein, 11 aa, Severe acute respiratory syndrome coronavirus 2
  REGION 1..11: note = Table B: HLA-DRB1*08:04L HLA-DRB1*13:01L HLA-DRB3*01:01L HLA-DRB1*15:01L
TVYSDVENPHL

SEQ ID NO: 20341 - protein, 15 aa, Severe acute respiratory syndrome coronavirus 2
  REGION 1..15: note = Table B: HLA-DRB1*08:04L HLA-DPA1*01:03-B1*04:02L HLA-DRB1*10:01L
SHRFYRLANECAQVL

SEQ ID NO: 20342 - protein, 14 aa, Severe acute respiratory syndrome coronavirus 2
  REGION 1..14: note = Table B: HLA-DRB1*08:04L HLA-DRB1*14:01L
ATTAYANSVFNICQ

SEQ ID NO: 20343 - protein, 12 aa, Severe acute respiratory syndrome coronavirus 2
  REGION 1..12: note = Table B: HLA-DRB1*08:04L HLA-DRB1*13:01L HLA-DRB1*07:01L
KYVRNLQHRLYE

SEQ ID NO: 20344 - protein, 12 aa, Severe acute respiratory syndrome coronavirus 2
  REGION 1..12: note = Table B: HLA-DRB1*08:04L HLA-DRB1*04:08L
YECLYRNRDVDT

SEQ ID NO: 20345 - protein, 14 aa, Severe acute respiratory syndrome coronavirus 2
  REGION 1..14: note = Table B: HLA-DRB1*08:04L
CLYRNRDVDTDFVN

SEQ ID NO: 20346 - protein, 13 aa, Severe acute respiratory syndrome coronavirus 2
  REGION 1..13: note = Table B: HLA-DRB1*08:04L HLA-DRB1*04:08L
RDVDTDFVNEFYA

SEQ ID NO: 20347 - protein, 12 aa, Severe acute respiratory syndrome coronavirus 2
  REGION 1..12: note = Table B: HLA-DRB1*08:04L
FYAYLRKHFSMM

SEQ ID NO: 20348 - protein, 16 aa, Severe acute respiratory syndrome coronavirus 2
  REGION 1..16: note = Table B: HLA-DRB1*08:04L HLA-DPA1*01:03-B1*04:02L
YAYLRKHFSMMILSDD

SEQ ID NO: 20349 - protein, 13 aa, Severe acute respiratory syndrome coronavirus 2
  REGION 1..13: note = Table B: HLA-DRB1*08:04L HLA-DRB1*07:01L
SIKNFKSVLYYQN

SEQ ID NO: 20350 - protein, 17 aa, Severe acute respiratory syndrome coronavirus 2
  REGION 1..17: note = Table B: HLA-DRB1*08:04L HLA-DPA1*01:03-B1*04:02L HLA-DRB1*12:01L
PHEFCSQHTMLVKQGDD

SEQ ID NO: 20351 - protein, 15 aa, Severe acute respiratory syndrome coronavirus 2
  REGION 1..15: note = Table B: HLA-DRB1*08:04L
SQHTMLVKQGDDYVY

SEQ ID NO: 20352 - protein, 12 aa, Severe acute respiratory syndrome coronavirus 2
  REGION 1..12: note = Table B: HLA-DRB1*08:04L HLA-DPA1*01:03-B1*03:01L HLA-DPA1*03:01-B1*04:02L HLA-DQA1*01:01-B1*05:01L HLA-DQA1*05:05-B1*03:19L HLA-DPA1*01:03-B1*04:01L HLA-DPA1*02:01-B1*13:01L HLA-DRB1*10:01L HLA-DRB1*08:03L
DYVYLPYPDPSR

SEQ ID NO: 20353 - protein, 13 aa, Severe acute respiratory syndrome coronavirus 2
  REGION 1..13: note = Table B: HLA-DRB1*08:04L HLA-DRB1*11:03L HLA-DRB1*11:04L
VYLPYPDPSRILG

SEQ ID NO: 20354 - protein, 15 aa, Severe acute respiratory syndrome coronavirus 2
  REGION 1..15: note = Table B: HLA-DRB1*08:04L
GAGCFVDDIVKTDGT

SEQ ID NO: 20355 - protein, 15 aa, Severe acute respiratory syndrome coronavirus 2
  REGION 1..15: note = Table B: HLA-DRB1*08:04L HLA-DPA1*03:01-B1*04:02L HLA-DPA1*01:03-B1*04:02L HLA-DPA1*02:01-B1*13:01L
AGCFVDDIVKTDGTL

SEQ ID NO: 20356 - protein, 11 aa, Severe acute respiratory syndrome coronavirus 2
  REGION 1..11: note = Table B: HLA-DRB1*08:04L HLA-DPA1*01:03-B1*03:01L HLA-DRB1*14:02L HLA-DRB1*04:10L HLA-DRB3*01:01L HLA-DRB1*04:08L
DDIVKTDGTLM

SEQ ID NO: 20357 - protein, 15 aa, Severe acute respiratory syndrome coronavirus 2
  REGION 1..15: note = Table B: HLA-DRB1*08:04L HLA-DPA1*01:03-B1*03:01L HLA-DRB1*03:01L HLA-DRB1*11:04L HLA-DRB3*01:01L HLA-DPA1*01:03-B1*02:01L
VSLAIDAYPLTKHPN

SEQ ID NO: 20358 - protein, 14 aa, Severe acute respiratory syndrome coronavirus 2
  REGION 1..14: note = Table B: HLA-DRB1*08:04L HLA-DRB1*11:04L HLA-DRB1*08:01L
AYPLTKHPNQEYAD

SEQ ID NO: 20359 - protein, 14 aa, Severe acute respiratory syndrome coronavirus 2
  REGION 1..14: note = Table B: HLA-DRB1*08:04L HLA-DRB1*08:01L
YPLTKHPNQEYADV

SEQ ID NO: 20360 - protein, 15 aa, Severe acute respiratory syndrome coronavirus 2
  REGION 1..15: note = Table B: HLA-DRB1*08:04L HLA-DRB1*08:01L HLA-DRB1*04:08L
HPNQEYADVFHLYLQ

SEQ ID NO: 20361 - protein, 15 aa, Severe acute respiratory syndrome coronavirus 2
  REGION 1..15: note = Table B: HLA-DRB1*08:04L
KLSYGIATVREVLSD

SEQ ID NO: 20362 - protein, 16 aa, Severe acute respiratory syndrome coronavirus 2
  REGION 1..16: note = Table B: HLA-DRB1*08:04L HLA-DPA1*01:03-B1*04:02L
LSYGIATVREVLSDRE

SEQ ID NO: 20363 - protein, 13 aa, Severe acute respiratory syndrome coronavirus 2
  REGION 1..13: note = Table B: HLA-DRB1*08:04L HLA-DRB3*02:01L HLA-DPA1*03:01-B1*04:02L HLA-DRB1*08:03L
IATVREVLSDREL

SEQ ID NO: 20364 - protein, 12 aa, Severe acute respiratory syndrome coronavirus 2
  REGION 1..12: note = Table B: HLA-DRB1*08:04L HLA-DRB3*01:01L HLA-DRB1*04:08L
REVLSDRELHLS

SEQ ID NO: 20365 - protein, 18 aa, Severe acute respiratory syndrome coronavirus 2
  REGION 1..18: note = Table B: HLA-DRB1*08:04L HLA-DPA1*01:03-B1*04:02L HLA-DQA1*03:01-B1*03:02L HLA-DPA1*01:03-B1*02:01L HLA-DPA1*01:03-B1*104:01L HLA-DRB1*07:01L HLA-DQA1*01:03-B1*06:01L
KPRPPLNRNYVFTGYRVT

SEQ ID NO: 20366 - protein, 13 aa, Severe acute respiratory syndrome coronavirus 2
  REGION 1..13: note = Table B: HLA-DRB1*08:04L
AVVYRGTTTYKLN

SEQ ID NO: 20367 - protein, 14 aa, Severe acute respiratory syndrome coronavirus 2
  REGION 1..14: note = Table B: HLA-DRB1*08:04L HLA-DRB1*03:01L HLA-DRB1*11:02L HLA-DQA1*01-B1*05L HLA-DRB4*02:01NL HLA-DRB1*04:10L HLA-DPA1*01:03-B1*04:02L HLA-DPA1*01:03-B1*02:01L HLA-DPA1*01:03-B1*104:01L HLA-DRB1*08:02L HLA-DRB1*08:03L
VVYRGTTTYKLNVG

SEQ ID NO: 20368 - protein, 12 aa, Severe acute respiratory syndrome coronavirus 2
  REGION 1..12: note = Table B: HLA-DRB1*08:04L HLA-DRB3*02:01L HLA-DRB1*09:01L HLA-DRB1*12:02L HLA-DRB3*01:01L HLA-DRB1*14:54L HLA-DRB1*04:08L
TTTYKLNVGDYF

SEQ ID NO: 20369 - protein, 13 aa, Severe acute respiratory syndrome coronavirus 2
  REGION 1..13: note = Table B: HLA-DRB1*08:04L HLA-DPA1*01:03-B1*03:01L
YFVLTSHTVMPLS

SEQ ID NO: 20370 - protein, 15 aa, Severe acute respiratory syndrome coronavirus 2
  REGION 1..15: note = Table B: HLA-DRB1*08:04L HLA-DRB1*03:01L HLA-DRB1*11:04L HLA-DRB1*11:01L HLA-DRB4*02:01NL HLA-DRB3*01:01L HLA-DPA1*01:03-B1*104:01L HLA-DRB1*08:02L HLA-DRB1*15:01L
SHTVMPLSAPTLVPQ

SEQ ID NO: 20371 - protein, 14 aa, Severe acute respiratory syndrome coronavirus 2
  REGION 1..14: note = Table B: HLA-DRB1*08:04L HLA-DRB3*02:01L HLA-DRB1*11:02L HLA-DRB1*11:04L HLA-DRB1*11:01L HLA-DRB3*01:01L
APTLVPQEHYVRIT

SEQ ID NO: 20372 - protein, 14 aa, Severe acute respiratory syndrome coronavirus 2
  REGION 1..14: note = Table B: HLA-DRB1*08:04L HLA-DPA1*01:03-B1*04:02L HLA-DPA1*02:01-B1*13:01L HLA-DRB1*10:01L
EHYVRITGLYPTLN

SEQ ID NO: 20373 - protein, 12 aa, Severe acute respiratory syndrome coronavirus 2
  REGION 1..12: note = Table B: HLA-DRB1*08:04L HLA-DRB3*02:01L HLA-DRB1*11:03L HLA-DRB1*11:04L HLA-DRB1*04:10L HLA-DRB1*09:01L HLA-DRB1*12:02L HLA-DQA1*05:05-B1*03:01L HLA-DRB1*04:08L
SDEFSSNVANYQ

SEQ ID NO: 20374 - protein, 12 aa, Severe acute respiratory syndrome coronavirus 2
  REGION 1..12: note = Table B: HLA-DRB1*08:04L HLA-DRB3*02:01L HLA-DRB1*12:02L HLA-DRB3*01:01L HLA-DRB1*14:54L HLA-DRB1*07:01L
VANYQKVGMQKY

SEQ ID NO: 20375 - protein, 14 aa, Severe acute respiratory syndrome coronavirus 2
  REGION 1..14: note = Table B: HLA-DRB1*08:04L HLA-DPA1*01:03-B1*03:01L HLA-DRB1*08:01L HLA-DRB1*12:01L HLA-DRB1*15:03L
HFAIGLALYYPSAR

SEQ ID NO: 20376 - protein, 17 aa, Severe acute respiratory syndrome coronavirus 2
  REGION 1..17: note = Table B: HLA-DRB1*08:04L HLA-DPA1*01:03-B1*03:01L
EKALKYLPIDKCSRIIP

SEQ ID NO: 20377 - protein, 18 aa, Severe acute respiratory syndrome coronavirus 2
  REGION 1..18: note = Table B: HLA-DRB1*08:04L HLA-DPA1*01:02-B1*04:01L
IPARARVECFDKFKVNST

SEQ ID NO: 20378 - protein, 12 aa, Severe acute respiratory syndrome coronavirus 2
  REGION 1..12: note = Table B: HLA-DRB1*08:04L HLA-DRB1*04:08L
KFKVNSTLEQYV

SEQ ID NO: 20379 - protein, 17 aa, Severe acute respiratory syndrome coronavirus 2
  REGION 1..17: note = Table B: HLA-DRB1*08:04L
APRTLLTKGTLEPEYFN

SEQ ID NO: 20380 - protein, 17 aa, Severe acute respiratory syndrome coronavirus 2
  REGION 1..17: note = Table B: HLA-DRB1*08:04L HLA-DQA1*05:05-B1*03:19L
PEYFNSVCRLMKTIGPD

SEQ ID NO: 20381 - protein, 11 aa, Severe acute respiratory syndrome coronavirus 2
  REGION 1..11: note = Table B: HLA-DRB1*08:04L HLA-DRB1*08:77L HLA-DRB1*03:01L HLA-DRB1*11:03L HLA-DRB1*14:02L HLA-DQA1*05:01-B1*02:01L
ALVYDNKLKAH

SEQ ID NO: 20382 - protein, 18 aa, Severe acute respiratory syndrome coronavirus 2
  REGION 1..18: note = Table B: HLA-DRB1*08:04L
DKSAQCFKMFYKGVITHD

SEQ ID NO: 20383 - protein, 12 aa, Severe acute respiratory syndrome coronavirus 2
  REGION 1..12: note = Table B: HLA-DRB1*08:04L HLA-DPA1*03:01-B1*04:02L HLA-DPA1*01:03-B1*04:01L HLA-DRB1*09:01L HLA-DRB3*01:01L HLA-DPA1*02:01-B1*13:01L HLA-DPA1*01:03-B1*02:01L HLA-DPA1*01:03-B1*104:01L HLA-DRB1*07:01L
DVSSAINRPQIG

SEQ ID NO: 20384 - protein, 17 aa, Severe acute respiratory syndrome coronavirus 2
  REGION 1..17: note = Table B: HLA-DRB1*08:04L
VVREFLTRNPAWRKAVF

SEQ ID NO: 20385 - protein, 13 aa, Severe acute respiratory syndrome coronavirus 2
  REGION 1..13: note = Table B: HLA-DRB1*08:04L HLA-DRB1*11:02L HLA-DRB1*14:02L HLA-DRB1*09:01L HLA-DRB1*12:02L HLA-DRB1*07:01L
VFISPYNSQNAVA

SEQ ID NO: 20386 - protein, 15 aa, Severe acute respiratory syndrome coronavirus 2
  REGION 1..15: note = Table B: HLA-DRB1*08:04L HLA-DRB1*14:01L
NSQNAVASKILGLPT

SEQ ID NO: 20387 - protein, 14 aa, Severe acute respiratory syndrome coronavirus 2
  REGION 1..14: note = Table B: HLA-DRB1*08:04L HLA-DQA1*05:05-B1*03:19L HLA-DPA1*01:03-B1*02:01L HLA-DQA1*05:05-B1*03:01L
EYDYVIFTQTTETA

SEQ ID NO: 20388 - protein, 12 aa, Severe acute respiratory syndrome coronavirus 2
  REGION 1..12: note = Table B: HLA-DRB1*08:04L HLA-DRB1*08:01L HLA-DPA1*02:01-B1*13:01L
YVIFTQTTETAH

SEQ ID NO: 20389 - protein, 16 aa, Severe acute respiratory syndrome coronavirus 2
  REGION 1..16: note = Table B: HLA-DRB1*08:04L HLA-DRB1*11:04L HLA-DRB1*11:01L HLA-DRB3*01:01L HLA-DPA1*01:03-B1*02:01L
RDLYDKLQFTSLEIPR

SEQ ID NO: 20390 - protein, 12 aa, Severe acute respiratory syndrome coronavirus 2
  REGION 1..12: note = Table B: HLA-DRB1*08:04L HLA-DRB1*08:01L HLA-DRB1*08:03L
GYVDTPNNTDFS

SEQ ID NO: 20391 - protein, 15 aa, Severe acute respiratory syndrome coronavirus 2
  REGION 1..15: note = Table B: HLA-DRB1*08:04L
FKHLIPLMYKGLPWN

SEQ ID NO: 20392 - protein, 13 aa, Severe acute respiratory syndrome coronavirus 2
  REGION 1..13: note = Table B: HLA-DRB1*08:04L HLA-DRB1*14:01L HLA-DRB1*11:01L HLA-DPA1*01:03-B1*04:02L HLA-DPA1*03:01-B1*105:01L HLA-DRB1*04:08L
DTYACWHHSIGFD

SEQ ID NO: 20393 - protein, 14 aa, Severe acute respiratory syndrome coronavirus 2
  REGION 1..14: note = Table B: HLA-DRB1*08:04L HLA-DRB1*14:02L
SIGFDYVYNPFMID

SEQ ID NO: 20394 - protein, 13 aa, Severe acute respiratory syndrome coronavirus 2
  REGION 1..13: note = Table B: HLA-DRB1*08:04L HLA-DPA1*01:03-B1*03:01L
VYNPFMIDVQQWG

SEQ ID NO: 20395 - protein, 14 aa, Severe acute respiratory syndrome coronavirus 2
  REGION 1..14: note = Table B: HLA-DRB1*08:04L HLA-DPA1*01:03-B1*03:01L HLA-DRB1*08:01L HLA-DQA1*01-B1*05L HLA-DPA1*01:03-B1*02:01L
ALLADKFPVLHDIG

SEQ ID NO: 20396 - protein, 15 aa, Severe acute respiratory syndrome coronavirus 2
  REGION 1..15: note = Table B: HLA-DRB1*08:04L
DVEWKFYDAQPCSDK

SEQ ID NO: 20397 - protein, 15 aa, Severe acute respiratory syndrome coronavirus 2
  REGION 1..15: note = Table B: HLA-DRB1*08:04L
VEWKFYDAQPCSDKA

SEQ ID NO: 20398 - protein, 14 aa, Severe acute respiratory syndrome coronavirus 2
  REGION 1..14: note = Table B: HLA-DRB1*08:04L HLA-DPA1*02:01-B1*13:01L
VVSDIDYVPLKSAT

SEQ ID NO: 20399 - protein, 15 aa, Severe acute respiratory syndrome coronavirus 2
  REGION 1..15: note = Table B: HLA-DRB1*08:04L HLA-DRB3*02:01L HLA-DPA1*01:03-B1*104:01L
VYKQFDTYNLWNTFT

SEQ ID NO: 20400 - protein, 11 aa, Severe acute respiratory syndrome coronavirus 2
  REGION 1..11: note = Table B: HLA-DRB1*08:04L HLA-DRB1*14:01L HLA-DRB1*08:01L
NLWNTFTRLQS

SEQ ID NO: 20401 - protein, 12 aa, Severe acute respiratory syndrome coronavirus 2
  REGION 1..12: note = Table B: HLA-DRB1*08:04L HLA-DRB1*08:01L HLA-DRB1*11:01L HLA-DRB1*04:08L
LWNTFTRLQSLE

SEQ ID NO: 20402 - protein, 14 aa, Severe acute respiratory syndrome coronavirus 2
  REGION 1..14: note = Table B: HLA-DRB1*08:04L HLA-DRB1*11:02L
TFTRLQSLENVAFN

SEQ ID NO: 20403 - protein, 14 aa, Severe acute respiratory syndrome coronavirus 2
  REGION 1..14: note = Table B: HLA-DRB1*08:04L
APLTVFFDGRVDGQ

SEQ ID NO: 20404 - protein, 12 aa, Severe acute respiratory syndrome coronavirus 2
  REGION 1..12: note = Table B: HLA-DRB1*08:04L
TYFTQSRNLQEF

SEQ ID NO: 20405 - protein, 12 aa, Severe acute respiratory syndrome coronavirus 2
  REGION 1..12: note = Table B: HLA-DRB1*08:04L HLA-DRB3*01:01L HLA-DRB1*04:08L
ELAMDEFIERYK

SEQ ID NO: 20406 - protein, 13 aa, Severe acute respiratory syndrome coronavirus 2
  REGION 1..13: note = Table B: HLA-DRB1*08:04L
FIERYKLEGYAFE

SEQ ID NO: 20407 - protein, 12 aa, Severe acute respiratory syndrome coronavirus 2
  REGION 1..12: note = Table B: HLA-DRB1*08:04L HLA-DPA1*01:03-B1*02:01L HLA-DQA1*05:05-B1*03:01L
IVYGDFSHSQLG

SEQ ID NO: 20408 - protein, 14 aa, Severe acute respiratory syndrome coronavirus 2
  REGION 1..14: note = Table B: HLA-DRB1*08:04L
AKRFKESPFELEDF

SEQ ID NO: 20409 - protein, 13 aa, Severe acute respiratory syndrome coronavirus 2
  REGION 1..13: note = Table B: HLA-DRB1*08:04L HLA-DRB1*14:01L HLA-DRB1*11:04L HLA-DRB1*11:01L HLA-DPA1*01:03-B1*02:01L
KESPFELEDFIPM

SEQ ID NO: 20410 - protein, 13 aa, Severe acute respiratory syndrome coronavirus 2
  REGION 1..13: note = Table B: HLA-DRB1*08:04L
DFIPMDSTVKNYF

SEQ ID NO: 20411 - protein, 14 aa, Severe acute respiratory syndrome coronavirus 2
  REGION 1..14: note = Table B: HLA-DRB1*08:04L HLA-DQA1*01:01-B1*05:01L
IPMDSTVKNYFITD

SEQ ID NO: 20412 - protein, 14 aa, Severe acute respiratory syndrome coronavirus 2
  REGION 1..14: note = Table B: HLA-DRB1*08:04L HLA-DPA1*01:03-B1*03:01L HLA-DRB1*03:01L HLA-DRB1*11:03L HLA-DRB1*11:04L HLA-DRB1*11:01L HLA-DRB3*01:01L HLA-DRB1*04:08L
SQDLSVVSKVVKVT

SEQ ID NO: 20413 - protein, 13 aa, Severe acute respiratory syndrome coronavirus 2
  REGION 1..13: note = Table B: HLA-DRB1*08:04L
LSVVSKVVKVTID

SEQ ID NO: 20414 - protein, 12 aa, Severe acute respiratory syndrome coronavirus 2
  REGION 1..12: note = Table B: HLA-DRB1*08:04L HLA-DRB3*01:01L
KVTIDYTEISFM

SEQ ID NO: 20415 - protein, 13 aa, Severe acute respiratory syndrome coronavirus 2
  REGION 1..13: note = Table B: HLA-DRB1*08:04L HLA-DRB1*04:08L
VPYNMRVIHFGAG

SEQ ID NO: 20416 - protein, 16 aa, Severe acute respiratory syndrome coronavirus 2
  REGION 1..16: note = Table B: HLA-DRB1*08:04L HLA-DRB1*08:01L HLA-DPA1*01:03-B1*04:02L HLA-DPA1*01:03-B1*104:01L
APGTAVLRQWLPTGTL

SEQ ID NO: 20417 - protein, 13 aa, Severe acute respiratory syndrome coronavirus 2
  REGION 1..13: note = Table B: HLA-DRB1*08:04L
GFIQQKLALGGSV

SEQ ID NO: 20418 - protein, 13 aa, Severe acute respiratory syndrome coronavirus 2
  REGION 1..13: note = Table B: HLA-DRB1*08:04L HLA-DPA1*03:01-B1*04:02L HLA-DPA1*01:02-B1*04:01L
GGSVAIKITEHSW

SEQ ID NO: 20419 - protein, 14 aa, Severe acute respiratory syndrome coronavirus 2
  REGION 1..14: note = Table B: HLA-DRB1*08:04L
ITEHSWNADLYKLM

SEQ ID NO: 20420 - protein, 14 aa, Severe acute respiratory syndrome coronavirus 2
  REGION 1..14: note = Table B: HLA-DRB1*08:04L
TEHSWNADLYKLMG

SEQ ID NO: 20421 - protein, 18 aa, Severe acute respiratory syndrome coronavirus 2
  REGION 1..18: note = Table B: HLA-DRB1*08:04L HLA-DPA1*01:03-B1*03:01L
DGYVMHANYIFWRNTNPI

SEQ ID NO: 20422 - protein, 13 aa, Severe acute respiratory syndrome coronavirus 2
  REGION 1..13: note = Table B: HLA-DRB1*08:04L HLA-DRB1*08:01L HLA-DQA1*05:05-B1*03:19L
DMILSLLSKGRLI

SEQ ID NO: 20423 - protein, 15 aa, Severe acute respiratory syndrome coronavirus 2
  REGION 1..15: note = Table B: HLA-DRB1*08:04L HLA-DRB1*03:01L HLA-DRB1*11:02L HLA-DRB1*11:03L HLA-DRB1*13:01L
ILSLLSKGRLIIREN

SEQ ID NO: 20424 - protein, 14 aa, Severe acute respiratory syndrome coronavirus 2
  REGION 1..14: note = Table B: HLA-DRB1*08:04L HLA-DRB1*08:03L HLA-DRB1*15:01L
DNPVLPFNDGVYFA

SEQ ID NO: 20425 - protein, 15 aa, Severe acute respiratory syndrome coronavirus 2
  REGION 1..15: note = Table B: HLA-DRB1*08:04L HLA-DRB1*08:01L HLA-DRB1*15:03L
DSKTQSLLIVNNATN

SEQ ID NO: 20426 - protein, 12 aa, Severe acute respiratory syndrome coronavirus 2
  REGION 1..12: note = Table B: HLA-DRB1*08:04L HLA-DRB1*11:04L HLA-DQA1*05:05-B1*03:01L HLA-DRB1*04:08L
LLIVNNATNVVI

SEQ ID NO: 20427 - protein, 14 aa, Severe acute respiratory syndrome coronavirus 2
  REGION 1..14: note = Table B: HLA-DRB1*08:04L HLA-DRB1*14:01L HLA-DRB1*11:04L HLA-DRB1*11:01L HLA-DRB3*01:01L
NKSWMESEFRVYSS

SEQ ID NO: 20428 - protein, 14 aa, Severe acute respiratory syndrome coronavirus 2
  REGION 1..14: note = Table B: HLA-DRB1*08:04L HLA-DRB1*11:02L HLA-DRB1*08:01L HLA-DRB1*11:01L HLA-DRB1*09:01L HLA-DRB1*10:01L
EFRVYSSANNCTFE

SEQ ID NO: 20429 - protein, 13 aa, Severe acute respiratory syndrome coronavirus 2
  REGION 1..13: note = Table B: HLA-DRB1*08:04L HLA-DRB1*08:01L
TFEYVSQPFLMDL

SEQ ID NO: 20430 - protein, 12 aa, Severe acute respiratory syndrome coronavirus 2
  REGION 1..12: note = Table B: HLA-DRB1*08:04L HLA-DRB1*08:01L HLA-DPA1*01:03-B1*02:01L
EYVSQPFLMDLE

SEQ ID NO: 20431 - protein, 12 aa, Severe acute respiratory syndrome coronavirus 2
  REGION 1..12: note = Table B: HLA-DRB1*08:04L HLA-DRB3*01:01L
EFVFKNIDGYFK

SEQ ID NO: 20432 - protein, 12 aa, Severe acute respiratory syndrome coronavirus 2
  REGION 1..12: note = Table B: HLA-DRB1*08:04L HLA-DRB1*03:01L
NLVRDLPQGFSA

SEQ ID NO: 20433 - protein, 13 aa, Severe acute respiratory syndrome coronavirus 2
  REGION 1..13: note = Table B: HLA-DRB1*08:04L HLA-DRB3*02:01L HLA-DRB1*14:54L
VDLPIGINITRFQ

SEQ ID NO: 20434 - protein, 12 aa, Severe acute respiratory syndrome coronavirus 2
  REGION 1..12: note = Table B: HLA-DRB1*08:04L HLA-DRB1*08:01L
AYYVGYLQPRTF

SEQ ID NO: 20435 - protein, 12 aa, Severe acute respiratory syndrome coronavirus 2
  REGION 1..12: note = Table B: HLA-DRB1*08:04L HLA-DRB1*14:01L HLA-DRB1*08:01L HLA-DRB1*12:01L HLA-DPA1*03:01-B1*105:01L HLA-DRB1*10:01L HLA-DRB1*15:03L
KSFTVEKGIYQT

SEQ ID NO: 20436 - protein, 14 aa, Severe acute respiratory syndrome coronavirus 2
  REGION 1..14: note = Table B: HLA-DRB1*08:04L HLA-DRB3*02:01L HLA-DPA1*03:01-B1*04:02L HLA-DRB1*08:01L HLA-DPA1*01:03-B1*04:01L HLA-DRB1*04:10L HLA-DPA1*01:03-B1*04:02L HLA-DRB1*08:03L
VQPTESIVRFPNIT

SEQ ID NO: 20437 - protein, 14 aa, Severe acute respiratory syndrome coronavirus 2
  REGION 1..14: note = Table B: HLA-DRB1*08:04L HLA-DPA1*01:03-B1*03:01L HLA-DPA1*02:01-B1*13:01L HLA-DQA1*05:05-B1*03:01L
QPTESIVRFPNITN

SEQ ID NO: 20438 - protein, 12 aa, Severe acute respiratory syndrome coronavirus 2
  REGION 1..12: note = Table B: HLA-DRB1*08:04L
ESIVRFPNITNL

SEQ ID NO: 20439 - protein, 13 aa, Severe acute respiratory syndrome coronavirus 2
  REGION 1..13: note = Table B: HLA-DRB1*08:04L HLA-DRB1*04:10L HLA-DRB1*14:54L
NVYADSFVIRGDE

SEQ ID NO: 20440 - protein, 15 aa, Severe acute respiratory syndrome coronavirus 2
  REGION 1..15: note = Table B: HLA-DRB1*08:04L HLA-DPA1*01:03-B1*03:01L HLA-DRB1*03:01L HLA-DQA1*05:01-B1*02:01L HLA-DPA1*03:01-B1*105:01L
DSFVIRGDEVRQIAP

SEQ ID NO: 20441 - protein, 12 aa, Severe acute respiratory syndrome coronavirus 2
  REGION 1..12: note = Table B: HLA-DRB1*08:04L HLA-DRB1*08:01L HLA-DRB1*04:08L
NNLDSKVGGNYN

SEQ ID NO: 20442 - protein, 15 aa, Severe acute respiratory syndrome coronavirus 2
  REGION 1..15: note = Table B: HLA-DRB1*08:04L
YNYLYRLFRKSNLKP

SEQ ID NO: 20443 - protein, 15 aa, Severe acute respiratory syndrome coronavirus 2
  REGION 1..15: note = Table B: HLA-DRB1*08:04L HLA-DRB1*11:03L
NYLYRLFRKSNLKPF

SEQ ID NO: 20444 - protein, 14 aa, Severe acute respiratory syndrome coronavirus 2
  REGION 1..14: note = Table B: HLA-DRB1*08:04L
LYRLFRKSNLKPFE

SEQ ID NO: 20445 - protein, 14 aa, Severe acute respiratory syndrome coronavirus 2
  REGION 1..14: note = Table B: HLA-DRB1*08:04L HLA-DRB3*02:01L HLA-DRB1*08:01L HLA-DRB1*11:01L HLA-DPA1*02:01-B1*13:01L HLA-DPA1*01:03-B1*104:01L
EIYQAGSTPCNGVE

SEQ ID NO: 20446 - protein, 14 aa, Severe acute respiratory syndrome coronavirus 2
  REGION 1..14: note = Table B: HLA-DRB1*08:04L HLA-DRB1*09:01L HLA-DRB1*12:02L HLA-DRB1*04:08L
YGFQPTNGVGYQPY

SEQ ID NO: 20447 - protein, 17 aa, Severe acute respiratory syndrome coronavirus 2
  REGION 1..17: note = Table B: HLA-DRB1*08:04L
QPTNGVGYQPYRVVVLS

SEQ ID NO: 20448 - protein, 13 aa, Severe acute respiratory syndrome coronavirus 2
  REGION 1..13: note = Table B: HLA-DRB1*08:04L
TGVLTESNKKFLP

SEQ ID NO: 20449 - protein, 13 aa, Severe acute respiratory syndrome coronavirus 2
  REGION 1..13: note = Table B: HLA-DRB1*08:04L
GVLTESNKKFLPF

SEQ ID NO: 20450 - protein, 13 aa, Severe acute respiratory syndrome coronavirus 2
  REGION 1..13: note = Table B: HLA-DRB1*08:04L HLA-DRB1*11:03L HLA-DRB1*07:01L
DIADTTDAVRDPQ

SEQ ID NO: 20451 - protein, 13 aa, Severe acute respiratory syndrome coronavirus 2
  REGION 1..13: note = Table B: HLA-DRB1*08:04L HLA-DPA1*01:03-B1*02:01L
TSNQVAVLYQDVN

SEQ ID NO: 20452 - protein, 12 aa, Severe acute respiratory syndrome coronavirus 2
  REGION 1..12: note = Table B: HLA-DRB1*08:04L HLA-DRB1*08:01L
LIGAEHVNNSYE

SEQ ID NO: 20453 - protein, 19 aa, Severe acute respiratory syndrome coronavirus 2
  REGION 1..19: note = Table B: HLA-DRB1*08:04L
TPPIKDFGGFNFSQILPDP

SEQ ID NO: 20454 - protein, 15 aa, Severe acute respiratory syndrome coronavirus 2
  REGION 1..15: note = Table B: HLA-DRB1*08:04L
NKVTLADAGFIKQYG

SEQ ID NO: 20455 - protein, 13 aa, Severe acute respiratory syndrome coronavirus 2
  REGION 1..13: note = Table B: HLA-DRB1*08:04L HLA-DRB1*08:01L HLA-DPA1*01:03-B1*104:01L
YRFNGIGVTQNVL

SEQ ID NO: 20456 - protein, 16 aa, Severe acute respiratory syndrome coronavirus 2
  REGION 1..16: note = Table B: HLA-DRB1*08:04L HLA-DRB1*09:01L
FNGIGVTQNVLYENQK

SEQ ID NO: 20457 - protein, 12 aa, Severe acute respiratory syndrome coronavirus 2
  REGION 1..12: note = Table B: HLA-DRB1*08:04L HLA-DRB3*02:01L HLA-DRB1*11:03L HLA-DRB1*11:04L HLA-DRB1*14:02L HLA-DRB1*08:01L HLA-DRB1*04:10L HLA-DRB1*12:02L HLA-DRB3*01:01L HLA-DRB1*08:03L
NVLYENQKLIAN

SEQ ID NO: 20458 - protein, 12 aa, Severe acute respiratory syndrome coronavirus 2
  REGION 1..12: note = Table B: HLA-DRB1*08:04L HLA-DPA1*01:03-B1*03:01L HLA-DRB1*11:04L HLA-DRB1*14:02L HLA-DRB1*08:01L HLA-DRB1*11:01L HLA-DQA1*05:05-B1*03:19L HLA-DPA1*01:03-B1*04:02L HLA-DRB3*01:01L HLA-DPA1*01:03-B1*02:01L
  REGION 1..12: note = CONT. FROM ABOVE: HLA-DQA1*05:05-B1*03:01L
VLYENQKLIANQ

SEQ ID NO: 20459 - protein, 13 aa, Severe acute respiratory syndrome coronavirus 2
  REGION 1..13: note = Table B: HLA-DRB1*08:04L
DSLSSTASALGKL

SEQ ID NO: 20460 - protein, 14 aa, Severe acute respiratory syndrome coronavirus 2
  REGION 1..14: note = Table B: HLA-DRB1*08:04L HLA-DRB1*08:01L
SSTASALGKLQDVV

SEQ ID NO: 20461 - protein, 13 aa, Severe acute respiratory syndrome coronavirus 2
  REGION 1..13: note = Table B: HLA-DRB1*08:04L HLA-DRB3*02:01L HLA-DRB1*11:03L HLA-DRB1*11:04L HLA-DRB1*07:01L HLA-DRB1*10:01L
LQDVVNQNAQALN

SEQ ID NO: 20462 - protein, 12 aa, Severe acute respiratory syndrome coronavirus 2
  REGION 1..12: note = Table B: HLA-DRB1*08:04L HLA-DRB3*02:01L HLA-DPA1*01:03-B1*03:01L HLA-DRB1*14:02L HLA-DQA1*05:05-B1*03:01L HLA-DRB1*04:08L
VVNQNAQALNTL

SEQ ID NO: 20463 - protein, 12 aa, Severe acute respiratory syndrome coronavirus 2
  REGION 1..12: note = Table B: HLA-DRB1*08:04L
QALNTLVKQLSS

SEQ ID NO: 20464 - protein, 13 aa, Severe acute respiratory syndrome coronavirus 2
  REGION 1..13: note = Table B: HLA-DRB1*08:04L HLA-DPA1*03:01-B1*04:02L HLA-DPA1*02:01-B1*13:01L
LVKQLSSNFGAIS

SEQ ID NO: 20465 - protein, 13 aa, Severe acute respiratory syndrome coronavirus 2
  REGION 1..13: note = Table B: HLA-DRB1*08:04L HLA-DRB1*08:77L
VKQLSSNFGAISS

SEQ ID NO: 20466 - protein, 14 aa, Severe acute respiratory syndrome coronavirus 2
  REGION 1..14: note = Table B: HLA-DRB1*08:04L HLA-DQA1*01:01-B1*05:01L HLA-DRB3*01:01L
ISSVLNDILSRLDK

SEQ ID NO: 20467 - protein, 13 aa, Severe acute respiratory syndrome coronavirus 2
  REGION 1..13: note = Table B: HLA-DRB1*08:04L HLA-DRB1*08:77L HLA-DPA1*01:03-B1*03:01L HLA-DPA1*03:01-B1*04:02L HLA-DRB1*11:03L HLA-DRB1*14:02L HLA-DQA1*01-B1*05L HLA-DRB1*04:10L HLA-DPA1*02:01-B1*13:01L HLA-DRB1*07:01L
  REGION 1..13: note = CONT. FROM ABOVE: HLA-DRB1*10:01L
EVQIDRLITGRLQ

SEQ ID NO: 20468 - protein, 14 aa, Severe acute respiratory syndrome coronavirus 2
  REGION 1..14: note = Table B: HLA-DRB1*08:04L HLA-DPA1*01:03-B1*104:01L
VFLHVTYVPAQEKN

SEQ ID NO: 20469 - protein, 13 aa, Severe acute respiratory syndrome coronavirus 2
  REGION 1..13: note = Table B: HLA-DRB1*08:04L HLA-DRB1*08:01L HLA-DRB1*04:08L
GTHWFVTQRNFYE

SEQ ID NO: 20470 - protein, 12 aa, Severe acute respiratory syndrome coronavirus 2
  REGION 1..12: note = Table B: HLA-DRB1*08:04L HLA-DRB1*12:02L HLA-DRB1*14:54L
NTVYDPLQPELD

SEQ ID NO: 20471 - protein, 15 aa, Severe acute respiratory syndrome coronavirus 2
  REGION 1..15: note = Table B: HLA-DRB1*08:04L HLA-DRB1*11:03L HLA-DRB1*11:01L HLA-DRB1*08:03L
KEELDKYFKNHTSPD

SEQ ID NO: 20472 - protein, 12 aa, Severe acute respiratory syndrome coronavirus 2
  REGION 1..12: note = Table B: HLA-DRB1*08:04L HLA-DPA1*01:03-B1*03:01L HLA-DRB1*11:03L HLA-DRB1*11:01L HLA-DRB1*04:10L HLA-DRB1*10:01L HLA-DRB1*15:03L
SGINASVVNIQK

SEQ ID NO: 20473 - protein, 12 aa, Severe acute respiratory syndrome coronavirus 2
  REGION 1..12: note = Table B: HLA-DRB1*08:04L HLA-DRB1*11:01L HLA-DPA1*01:03-B1*104:01L
GINASVVNIQKE

SEQ ID NO: 20474 - protein, 12 aa, Severe acute respiratory syndrome coronavirus 2
  REGION 1..12: note = Table B: HLA-DRB1*08:04L HLA-DRB1*11:03L HLA-DRB1*04:10L HLA-DRB3*01:01L HLA-DRB1*14:54L
LNEVAKNLNESL

SEQ ID NO: 20475 - protein, 13 aa, Severe acute respiratory syndrome coronavirus 2
  REGION 1..13: note = Table B: HLA-DRB1*08:04L HLA-DRB1*11:03L HLA-DRB1*14:17L
NEVAKNLNESLID

SEQ ID NO: 20476 - protein, 14 aa, Severe acute respiratory syndrome coronavirus 2
  REGION 1..14: note = Table B: HLA-DRB1*08:04L HLA-DQA1*01:01-B1*05:01L
EVAKNLNESLIDLQ

SEQ ID NO: 20477 - protein, 13 aa, Severe acute respiratory syndrome coronavirus 2
  REGION 1..13: note = Table B: HLA-DRB1*08:04L HLA-DRB1*04:10L
ESLIDLQELGKYE

SEQ ID NO: 20478 - protein, 13 aa, Severe acute respiratory syndrome coronavirus 2
  REGION 1..13: note = Table B: HLA-DRB1*08:04L
IDLQELGKYEQYI

SEQ ID NO: 20479 - protein, 12 aa, Severe acute respiratory syndrome coronavirus 2
  REGION 1..12: note = Table B: HLA-DRB1*08:04L HLA-DRB1*14:01L
LGKYEQYIKWPW

SEQ ID NO: 20480 - protein, 10 aa, Severe acute respiratory syndrome coronavirus 2
  REGION 1..10: note = Table B: HLA-DRB1*08:04L HLA-DRB1*14:01L HLA-DRB1*08:01L
IITLKKRWQL

SEQ ID NO: 20481 - protein, 13 aa, Severe acute respiratory syndrome coronavirus 2
  REGION 1..13: note = Table B: HLA-DRB1*08:04L HLA-DRB3*02:01L HLA-DRB1*08:01L HLA-DPA1*01:03-B1*02:01L
VYFLQSINFVRII

SEQ ID NO: 20482 - protein, 18 aa, Severe acute respiratory syndrome coronavirus 2
  REGION 1..18: note = Table B: HLA-DRB1*08:04L HLA-DRB3*02:01L
SPISEHDYQIGGYTEKWE

SEQ ID NO: 20483 - protein, 15 aa, Severe acute respiratory syndrome coronavirus 2
  REGION 1..15: note = Table B: HLA-DRB1*08:04L HLA-DRB1*11:02L HLA-DRB4*01:01L HLA-DPA1*01:03-B1*04:02L HLA-DRB1*12:02L HLA-DRB1*08:02L
SDYYQLYSTQLSTDT

SEQ ID NO: 20484 - protein, 12 aa, Severe acute respiratory syndrome coronavirus 2
  REGION 1..12: note = Table B: HLA-DRB1*08:04L HLA-DRB1*08:01L HLA-DRB1*04:08L
VTFFIYNKIVDE

SEQ ID NO: 20485 - protein, 17 aa, Severe acute respiratory syndrome coronavirus 2
  REGION 1..17: note = Table B: HLA-DRB1*08:04L
SSGVVNPVMEPIYDEPT

SEQ ID NO: 20486 - protein, 14 aa, Severe acute respiratory syndrome coronavirus 2
  REGION 1..14: note = Table B: HLA-DRB1*08:04L HLA-DPA1*01:03-B1*03:01L
YSRVKNLNSSRVPD

SEQ ID NO: 20487 - protein, 14 aa, Severe acute respiratory syndrome coronavirus 2
  REGION 1..14: note = Table B: HLA-DRB1*08:04L HLA-DQA1*01:01-B1*05:01L HLA-DRB1*09:01L HLA-DPA1*01:03-B1*104:01L
SRVKNLNSSRVPDL

SEQ ID NO: 20488 - protein, 13 aa, Severe acute respiratory syndrome coronavirus 2
  REGION 1..13: note = Table B: HLA-DRB1*08:04L HLA-DPA1*01:03-B1*02:01L
SNGTITVEELKKL

SEQ ID NO: 20489 - protein, 13 aa, Severe acute respiratory syndrome coronavirus 2
  REGION 1..13: note = Table B: HLA-DRB1*08:04L
GTITVEELKKLLE

SEQ ID NO: 20490 - protein, 11 aa, Severe acute respiratory syndrome coronavirus 2
  REGION 1..11: note = Table B: HLA-DRB1*08:04L HLA-DRB1*08:01L
TVEELKKLLEQ

SEQ ID NO: 20491 - protein, 13 aa, Severe acute respiratory syndrome coronavirus 2
  REGION 1..13: note = Table B: HLA-DRB1*08:04L
RNRFLYIIKLIFL

SEQ ID NO: 20492 - protein, 14 aa, Severe acute respiratory syndrome coronavirus 2
  REGION 1..14: note = Table B: HLA-DRB1*08:04L HLA-DRB1*03:01L HLA-DRB1*11:03L HLA-DRB1*13:01L
AVILRGHLRIAGHH

SEQ ID NO: 20493 - protein, 16 aa, Severe acute respiratory syndrome coronavirus 2
  REGION 1..16: note = Table B: HLA-DRB1*08:04L
EITVATSRTLSYYKLG

SEQ ID NO: 20494 - protein, 12 aa, Severe acute respiratory syndrome coronavirus 2
  REGION 1..12: note = Table B: HLA-DRB1*08:04L
LDYIINLIIKNL

SEQ ID NO: 20495 - protein, 16 aa, Severe acute respiratory syndrome coronavirus 2
  REGION 1..16: note = Table B: HLA-DRB1*08:04L
KSLTENKYSQLDEEQP

SEQ ID NO: 20496 - protein, 13 aa, Severe acute respiratory syndrome coronavirus 2
  REGION 1..13: note = Table B: HLA-DRB1*08:04L
LYHYQECVRGTTV

SEQ ID NO: 20497 - protein, 13 aa, Severe acute respiratory syndrome coronavirus 2
  REGION 1..13: note = Table B: HLA-DRB1*08:04L
YHYQECVRGTTVL

SEQ ID NO: 20498 - protein, 12 aa, Severe acute respiratory syndrome coronavirus 2
  REGION 1..12: note = Table B: HLA-DRB1*08:04L
NSPFHPLADNKF

SEQ ID NO: 20499 - protein, 13 aa, Severe acute respiratory syndrome coronavirus 2
  REGION 1..13: note = Table B: HLA-DRB1*08:04L HLA-DRB1*14:02L HLA-DQA1*05:05-B1*03:01L HLA-DRB1*07:01L HLA-DRB1*08:03L
YEDFLEYHDVRVV

SEQ ID NO: 20500 - protein, 12 aa, Severe acute respiratory syndrome coronavirus 2
  REGION 1..12: note = Table B: HLA-DRB1*08:04L HLA-DRB1*08:01L HLA-DRB1*04:08L
LEYHDVRVVLDF

SEQ ID NO: 20501 - protein, 18 aa, Severe acute respiratory syndrome coronavirus 2
  REGION 1..18: note = Table B: HLA-DRB1*08:04L HLA-DQA1*05:05-B1*03:19L HLA-DRB1*08:02L
SPDDQIGYYRRATRRIRG

SEQ ID NO: 20502 - protein, 15 aa, Severe acute respiratory syndrome coronavirus 2
  REGION 1..15: note = Table B: HLA-DRB1*08:04L HLA-DRB1*15:03L
PRWYFYYLGTGPEAG

SEQ ID NO: 20503 - protein, 14 aa, Severe acute respiratory syndrome coronavirus 2
  REGION 1..14: note = Table B: HLA-DRB1*08:04L HLA-DRB3*02:01L HLA-DPA1*03:01-B1*04:02L HLA-DRB1*03:01L HLA-DRB1*14:01L HLA-DRB1*08:01L HLA-DRB1*11:01L HLA-DQA1*01-B1*05L HLA-DRB1*09:01L HLA-DPA1*01:03-B1*04:02L HLA-DRB3*01:01L
  REGION 1..14: note = CONT. FROM ABOVE: HLA-DPA1*02:01-B1*13:01L HLA-DPA1*01:03-B1*104 :01L HLA-DPA1*01:02-B1*04:01L HLA-DRB1*07:01L HLA-DRB1*08:02L HL A-DRB1*08:03L
IIWVATEGALNTPK

SEQ ID NO: 20504 - protein, 17 aa, Severe acute respiratory syndrome coronavirus 2
  REGION 1..17: note = Table B: HLA-DRB1*08:04L HLA-DQA1*01-B1*05L HLA-DPA1*01:02-B1*04:01L
NPANNAAIVLQLPQGTT

SEQ ID NO: 20505 - protein, 11 aa, Severe acute respiratory syndrome coronavirus 2
  REGION 1..11: note = Table B: HLA-DRB1*08:04L HLA-DRB1*14:54L
LALLLLDRLNQ

SEQ ID NO: 20506 - protein, 15 aa, Severe acute respiratory syndrome coronavirus 2
  REGION 1..15: note = Table B: HLA-DRB1*08:04L HLA-DRB1*11:04L
QELIRQGTDYKHWPQ

SEQ ID NO: 20507 - protein, 12 aa, Severe acute respiratory syndrome coronavirus 2
  REGION 1..12: note = Table B: HLA-DRB1*08:04L HLA-DPA1*03:01-B1*04:02L HLA-DRB1*08:01L HLA-DRB1*12:01L HLA-DRB1*14:54L
ASAFFGMSRIGM

SEQ ID NO: 20508 - protein, 11 aa, Severe acute respiratory syndrome coronavirus 2
  REGION 1..11: note = Table B: HLA-DRB1*08:04L HLA-DRB1*14:01L HLA-DRB1*08:01L HLA-DPA1*03:01-B1*105:01L
AFFGMSRIGME

SEQ ID NO: 20509 - protein, 14 aa, Severe acute respiratory syndrome coronavirus 2
  REGION 1..14: note = Table B: HLA-DRB1*08:04L HLA-DRB1*08:01L
VTLLPAADLDDFSK

SEQ ID NO: 20510 - protein, 14 aa, Severe acute respiratory syndrome coronavirus 2
  REGION 1..14: note = Table B: HLA-DRB1*08:04L HLA-DPA1*01:03-B1*03:01L HLA-DRB1*14:01L HLA-DRB1*14:02L HLA-DPA1*02:01-B1*13:01L
DLDDFSKQLQQSMS

SEQ ID NO: 20511 - protein, 11 aa, Severe acute respiratory syndrome coronavirus 2
  REGION 1..11: note = Table B: HLA-DRB1*08:77L HLA-DRB1*16:01L
NGNKGAGGHSY

SEQ ID NO: 20512 - protein, 15 aa, Severe acute respiratory syndrome coronavirus 2
  REGION 1..15: note = Table B: HLA-DRB1*08:77L HLA-DRB3*02:01L HLA-DRB1*14:02L HLA-DRB1*12:02L HLA-DPA1*01:02-B1*04:01L
EAKKVKPTVVVNAAN

SEQ ID NO: 20513 - protein, 14 aa, Severe acute respiratory syndrome coronavirus 2
  REGION 1..14: note = Table B: HLA-DRB1*08:77L HLA-DRB1*03:01L HLA-DRB1*09:01L HLA-DPA1*01:03-B1*04:02L HLA-DRB1*07:01L HLA-DQA1*01:03-B1*06:01L
SSFLEMKSEKQVEQ

SEQ ID NO: 20514 - protein, 11 aa, Severe acute respiratory syndrome coronavirus 2
  REGION 1..11: note = Table B: HLA-DRB1*08:77L HLA-DQA1*05:05-B1*03:19L HLA-DQA1*05:01-B1*02:01L HLA-DQA1*03:01-B1*03:02L HLA-DPA1*01:03-B1*104:01L
QEILGTVSWNL

SEQ ID NO: 20515 - protein, 11 aa, Severe acute respiratory syndrome coronavirus 2
  REGION 1..11: note = Table B: HLA-DRB1*08:77L HLA-DQA1*05:05-B1*03:116L HLA-DRB1*10:01L
VVDYGARFYFY

SEQ ID NO: 20516 - protein, 13 aa, Severe acute respiratory syndrome coronavirus 2
  REGION 1..13: note = Table B: HLA-DRB1*08:77L HLA-DRB1*09:01L HLA-DPA1*01:03-B1*104:01L HLA-DRB1*07:01L HLA-DRB1*10:01L
NINLHTQVVDMSM

SEQ ID NO: 20517 - protein, 10 aa, Severe acute respiratory syndrome coronavirus 2
  REGION 1..10: note = Table B: HLA-DRB1*08:77L HLA-DPA1*01:03-B1*03:01L HLA-DRB1*03:01L HLA-DRB1*11:02L HLA-DQA1*01-B1*05L HLA-DQA1*05:05-B1*03:19M HLA-DQA1*05:01-B1*02:01L HLA-DPA1*01:03-B1*104:01L HLA-DRB1*10:01L HLA-DRB1*16:01L
TDVFYKENSY

SEQ ID NO: 20518 - protein, 11 aa, Severe acute respiratory syndrome coronavirus 2
  REGION 1..11: note = Table B: HLA-DRB1*08:77L HLA-DRB3*02:01L HLA-DRB1*11:03L HLA-DRB1*11:04L HLA-DRB1*11:01L HLA-DQA1*05:05-B1*03:116L HLA-DRB1*12:02L HLA-DPA1*01:03-B1*02:01L HLA-DRB1*10:01L
NSYTTTIKPVT

SEQ ID NO: 20519 - protein, 13 aa, Severe acute respiratory syndrome coronavirus 2
  REGION 1..13: note = Table B: HLA-DRB1*08:77L HLA-DPA1*01:03-B1*03:01L HLA-DRB1*03:01L HLA-DRB1*11:03L HLA-DRB1*14:02L HLA-DRB1*08:01L HLA-DRB4*01:01L HLA-DRB1*12:02L HLA-DQA1*05:05-B1*03:01L HLA-DQA1*01:03-B1*06:01L
NIKFADDLNQLTG

SEQ ID NO: 20520 - protein, 10 aa, Severe acute respiratory syndrome coronavirus 2
  REGION 1..10: note = Table B: HLA-DRB1*08:77L HLA-DPA1*01:03-B1*03:01L HLA-DRB1*03:01L HLA-DRB1*11:02L HLA-DQA1*01-B1*05L HLA-DQA1*05:05-B1*03:19M HLA-DQA1*05:01-B1*02:01M HLA-DRB4*01:01L HLA-DPA1*01:03-B1*04:01L
  REGION 1..10: note = CONT. FROM ABOVE: HLA-DPA1*01:03-B1*104:01L HLA-DRB1*10:01L HLA- DRB1*16:01L
ADDLNQLTGY

SEQ ID NO: 20521 - protein, 12 aa, Severe acute respiratory syndrome coronavirus 2
  REGION 1..12: note = Table B: HLA-DRB1*08:77L HLA-DRB3*02:01L HLA-DPA1*03:01-B1*04:02L HLA-DRB1*14:01L HLA-DPA1*03:01-B1*105:01L
FDVLKSEDAQGM

SEQ ID NO: 20522 - protein, 11 aa, Severe acute respiratory syndrome coronavirus 2
  REGION 1..11: note = Table B: HLA-DRB1*08:77L HLA-DRB3*02:01L HLA-DRB1*07:01L
TILRTTNGDFL

SEQ ID NO: 20523 - protein, 15 aa, Severe acute respiratory syndrome coronavirus 2
  REGION 1..15: note = Table B: HLA-DRB1*08:77L HLA-DRB1*11:03L HLA-DRB1*11:04L HLA-DRB1*11:01L HLA-DRB1*08:02L
TFYLTNDVSFLAHIQ

SEQ ID NO: 20524 - protein, 13 aa, Severe acute respiratory syndrome coronavirus 2
  REGION 1..13: note = Table B: HLA-DRB1*08:77L HLA-DRB3*02:01L HLA-DRB1*11:03L HLA-DRB1*11:04L HLA-DRB1*14:02L HLA-DRB1*11:01L HLA-DRB1*09:01L HLA-DPA1*01:03-B1*04:02L HLA-DPA1*01:03-B1*104:01L HLA-DRB1*07:01L
SNHNFLVQAGNVQ

SEQ ID NO: 20525 - protein, 13 aa, Severe acute respiratory syndrome coronavirus 2
  REGION 1..13: note = Table B: HLA-DRB1*08:77L HLA-DRB1*11:03L HLA-DRB1*11:04L HLA-DRB1*14:02L HLA-DRB1*08:01L HLA-DRB1*11:01L HLA-DRB4*01:01L HLA-DRB1*04:10L HLA-DRB3*01:01L HLA-DPA1*01:03-B1*02:01L HLA-DPA1*01:03-B1*104:01L HLA-DQA1*05:05-B1*03:01L
GSALLEDEFTPFD

SEQ ID NO: 20526 - protein, 13 aa, Severe acute respiratory syndrome coronavirus 2
  REGION 1..13: note = Table B: HLA-DRB1*08:77L HLA-DRB3*02:01L HLA-DPA1*03:01-B1*04:02L HLA-DRB1*11:03L HLA-DRB1*14:02L HLA-DRB5*01:01L HLA-DRB1*09:01L HLA-DPA1*01:03-B1*104:01L HLA-DRB1*07:01L
IISVTSNYSGVVT

SEQ ID NO: 20527 - protein, 10 aa, Severe acute respiratory syndrome coronavirus 2
  REGION 1..10: note = Table B: HLA-DRB1*08:77L HLA-DPA1*01:03-B1*03:01L HLA-DRB1*03:01L HLA-DRB1*11:02L HLA-DQA1*01-B1*05L HLA-DQA1*05:05-B1*03:19M HLA-DQA1*05:01-B1*02:01L HLA-DPA1*01:03-B1*104:01L HLA-DRB1*16:01L
ASEFSSLPSY

SEQ ID NO: 20528 - protein, 14 aa, Severe acute respiratory syndrome coronavirus 2
  REGION 1..14: note = Table B: HLA-DRB1*08:77L HLA-DPA1*03:01-B1*04:02L HLA-DRB1*03:01L HLA-DRB1*11:02L HLA-DRB1*11:03L HLA-DRB1*11:04L HLA-DRB1*14:02L HLA-DRB1*11:01L HLA-DQA1*05:05-B1*03:19L HLA-DPA1*03:01-B1*105:01L
NNIINNARDGCVPL

SEQ ID NO: 20529 - protein, 12 aa, Severe acute respiratory syndrome coronavirus 2
  REGION 1..12: note = Table B: HLA-DRB1*08:77L HLA-DPA1*01:03-B1*03:01L HLA-DRB1*08:01L HLA-DQA1*05:05-B1*03:19L HLA-DRB4*01:01L HLA-DRB1*09:01L HLA-DPA1*02:01-B1*13:01L
WEIQQVVDADSK

SEQ ID NO: 20530 - protein, 11 aa, Severe acute respiratory syndrome coronavirus 2
  REGION 1..11: note = Table B: HLA-DRB1*08:77L HLA-DRB1*12:02L
TALRANSAVKL

SEQ ID NO: 20531 - protein, 14 aa, Severe acute respiratory syndrome coronavirus 2
  REGION 1..14: note = Table B: HLA-DRB1*08:77L HLA-DRB1*14:01L
QAITVTPEANMDQE

SEQ ID NO: 20532 - protein, 16 aa, Severe acute respiratory syndrome coronavirus 2
  REGION 1..16: note = Table B: HLA-DRB1*08:77L HLA-DRB3*02:01L HLA-DPA1*03:01-B1*04:02L HLA-DRB1*14:01L HLA-DRB4*01:01L HLA-DPA1*01:03-B1*04:01L HLA-DPA1*01:03-B1*104:01L HLA-DRB1*07:01L
VTPEANMDQESFGGAS

SEQ ID NO: 20533 - protein, 13 aa, Severe acute respiratory syndrome coronavirus 2
  REGION 1..13: note = Table B: HLA-DRB1*08:77L HLA-DRB1*11:03L HLA-DRB1*11:04L HLA-DRB1*14:02L HLA-DRB1*11:01L HLA-DRB1*09:01L HLA-DRB3*01:01L HLA-DPA1*01:03-B1*02:01L HLA-DPA1*01:03-B1*104:01L HLA-DRB1*07:01L
DDYVYLPYPDPSR

SEQ ID NO: 20534 - protein, 13 aa, Severe acute respiratory syndrome coronavirus 2
  REGION 1..13: note = Table B: HLA-DRB1*08:77L HLA-DRB1*11:03L HLA-DRB4*01:01L HLA-DQA1*05:05-B1*03:116L HLA-DRB1*12:02L HLA-DRB1*07:01L HLA-DRB1*08:03L
LFAAETLKATEET

SEQ ID NO: 20535 - protein, 14 aa, Severe acute respiratory syndrome coronavirus 2
  REGION 1..14: note = Table B: HLA-DRB1*08:77L HLA-DPA1*01:03-B1*03:01L HLA-DRB1*03:01L HLA-DRB1*11:01L HLA-DQA1*05:05-B1*03:19L HLA-DRB1*09:01L HLA-DRB3*01:01L HLA-DPA1*03:01-B1*105:01L HLA-DRB1*07:01L HLA-DRB1*08:02L
MQKYSTLQGPPGTG

SEQ ID NO: 20536 - protein, 17 aa, Severe acute respiratory syndrome coronavirus 2
  REGION 1..17: note = Table B: HLA-DRB1*08:77L HLA-DRB1*03:01L HLA-DRB4*01:01L HLA-DRB1*12:02L HLA-DRB1*15:01L
YPSARIVYTACSHAAVD

SEQ ID NO: 20537 - protein, 10 aa, Severe acute respiratory syndrome coronavirus 2
  REGION 1..10: note = Table B: HLA-DRB1*08:77L HLA-DPA1*01:03-B1*03:01L HLA-DRB1*03:01L HLA-DQA1*01-B1*05L HLA-DQA1*05:05-B1*03:19M HLA-DQA1*05:01-B1*02:01L HLA-DPA1*01:03-B1*104:01L HLA-DRB1*16:01L
FDEISMATNY

SEQ ID NO: 20538 - protein, 13 aa, Severe acute respiratory syndrome coronavirus 2
  REGION 1..13: note = Table B: HLA-DRB1*08:77L
THLSVDTKFKTEG

SEQ ID NO: 20539 - protein, 15 aa, Severe acute respiratory syndrome coronavirus 2
  REGION 1..15: note = Table B: HLA-DRB1*08:77L HLA-DRB1*03:01L HLA-DQA1*01:01-B1*05:01L HLA-DRB4*01:01L HLA-DQA1*05:05-B1*03:116L HLA-DRB1*04:10L
IGFDYVYNPFMIDVQ

SEQ ID NO: 20540 - protein, 14 aa, Severe acute respiratory syndrome coronavirus 2
  REGION 1..14: note = Table B: HLA-DRB1*08:77L HLA-DRB1*03:01L HLA-DRB1*11:02L HLA-DPA1*01:03-B1*04:01L HLA-DRB1*09:01L HLA-DPA1*01:03-B1*02:01L HLA-DRB1*08:02L
VEWKFYDAQPCSDK

SEQ ID NO: 20541 - protein, 15 aa, Severe acute respiratory syndrome coronavirus 2
  REGION 1..15: note = Table B: HLA-DRB1*08:77L HLA-DRB3*02:01L HLA-DPA1*03:01-B1*04:02L HLA-DRB1*03:01L HLA-DRB1*11:02L HLA-DRB1*11:03L HLA-DRB1*14:02L HLA-DRB1*08:01L HLA-DRB4*01:01L HLA-DRB1*09:01L HLA-DPA1*01:03-B1*04:02L HLA-DRB3*01:01L
  REGION 1..15: note = CONT. FROM ABOVE: HLA-DPA1*01:03-B1*104:01L HLA-DRB1*08:02L HLA- DRB1*08:03L
DTRVLSNLNLPGCDG

SEQ ID NO: 20542 - protein, 12 aa, Severe acute respiratory syndrome coronavirus 2
  REGION 1..12: note = Table B: HLA-DRB1*08:77L HLA-DRB3*02:01L HLA-DRB1*11:02L HLA-DRB1*14:02L HLA-DRB4*01:01L HLA-DPA1*01:03-B1*04:01L HLA-DQA1*05:05-B1*03:116L HLA-DRB1*09:01L HLA-DRB3*01:01L HLA-DPA1*01:03-B1*02:01L HLA-DPA1*01:03-B1*104:01L
  REGION 1..12: note = CONT. FROM ABOVE: HLA-DRB1*07:01L HLA-DRB1*08:02L
WNTFTRLQSLEN

SEQ ID NO: 20543 - protein, 13 aa, Severe acute respiratory syndrome coronavirus 2
  REGION 1..13: note = Table B: HLA-DRB1*08:77L HLA-DRB1*11:02L HLA-DPA1*01:03-B1*02:01L
NVAFNVVNKGHFD

SEQ ID NO: 20544 - protein, 13 aa, Severe acute respiratory syndrome coronavirus 2
  REGION 1..13: note = Table B: HLA-DRB1*08:77L HLA-DRB1*03:01L HLA-DRB1*11:02L HLA-DRB1*13:01L
VAFNVVNKGHFDG

SEQ ID NO: 20545 - protein, 15 aa, Severe acute respiratory syndrome coronavirus 2
  REGION 1..15: note = Table B: HLA-DRB1*08:77L HLA-DRB1*11:02L HLA-DRB4*01:01L
ESPFELEDFIPMDST

SEQ ID NO: 20546 - protein, 11 aa, Severe acute respiratory syndrome coronavirus 2
  REGION 1..11: note = Table B: HLA-DRB1*08:77L HLA-DRB1*03:01L HLA-DQA1*01-B1*05L HLA-DQA1*05:05-B1*03:19L HLA-DPA1*01:03-B1*04:02L HLA-DQA1*01:03-B1*06:01L
VAPGTAVLRQW

SEQ ID NO: 20547 - protein, 13 aa, Severe acute respiratory syndrome coronavirus 2
  REGION 1..13: note = Table B: HLA-DRB1*08:77L HLA-DRB3*02:01L HLA-DPA1*01:03-B1*03:01L
KLALGGSVAIKIT

SEQ ID NO: 20548 - protein, 13 aa, Severe acute respiratory syndrome coronavirus 2
  REGION 1..13: note = Table B: HLA-DRB1*08:77L HLA-DRB1*11:03L HLA-DQA1*05:05-B1*03:116L HLA-DRB1*09:01L HLA-DRB1*12:02L HLA-DRB1*08:03L
GVYFASTEKSNII

SEQ ID NO: 20549 - protein, 13 aa, Severe acute respiratory syndrome coronavirus 2
  REGION 1..13: note = Table B: HLA-DRB1*08:77L HLA-DRB1*11:03L HLA-DRB1*11:01L HLA-DRB3*01:01L HLA-DRB1*08:03L
VYFASTEKSNIIR

SEQ ID NO: 20550 - protein, 15 aa, Severe acute respiratory syndrome coronavirus 2
  REGION 1..15: note = Table B: HLA-DRB1*08:77L HLA-DRB1*11:02L HLA-DRB1*09:01L HLA-DPA1*01:03-B1*104:01L HLA-DRB1*15:01L
LKSFTVEKGIYQTSN

SEQ ID NO: 20551 - protein, 11 aa, Severe acute respiratory syndrome coronavirus 2
  REGION 1..11: note = Table B: HLA-DRB1*08:77L HLA-DQA1*05:01-B1*02:01L HLA-DPA1*01:03-B1*04:01L
RVQPTESIVRF

SEQ ID NO: 20552 - protein, 14 aa, Severe acute respiratory syndrome coronavirus 2
  REGION 1..14: note = Table B: HLA-DRB1*08:77L HLA-DRB1*14:02L HLA-DRB1*11:01L HLA-DRB4*01:01L HLA-DRB1*09:01L
ADYSVLYNSASFST

SEQ ID NO: 20553 - protein, 14 aa, Severe acute respiratory syndrome coronavirus 2
  REGION 1..14: note = Table B: HLA-DRB1*08:77L HLA-DRB1*03:01L HLA-DRB1*11:03L HLA-DRB1*11:01L HLA-DRB4*01:01L HLA-DPA1*01:03-B1*04:01L HLA-DRB1*09:01L HLA-DPA1*01:03-B1*02:01L HLA-DPA1*01:03-B1*104:01L HLA-DRB1*07:01L HLA-DRB1*10:01L
TNVYADSFVIRGDE

SEQ ID NO: 20554 - protein, 13 aa, Severe acute respiratory syndrome coronavirus 2
  REGION 1..13: note = Table B: HLA-DRB1*08:77L HLA-DRB3*02:01L HLA-DRB1*11:03L HLA-DRB1*14:02L HLA-DQA1*01:01-B1*05:01L HLA-DRB1*11:01L HLA-DQA1*05:05-B1*03:19L HLA-DPA1*01:03-B1*04:02L HLA-DRB1*12:02L HLA-DRB3*01:01L HLA-DRB1*10:01L HLA-DRB1*08:02L
DLLFNKVTLADAG

SEQ ID NO: 20555 - protein, 12 aa, Severe acute respiratory syndrome coronavirus 2
  REGION 1..12: note = Table B: HLA-DRB1*08:77L HLA-DRB3*02:01L HLA-DPA1*01:03-B1*03:01L HLA-DRB1*11:03L HLA-DQA1*01:01-B1*05:01L HLA-DQA1*01-B1*05L HLA-DRB1*04:10L HLA-DRB1*09:01L HLA-DPA1*02:01-B1*13:01L HLA-DRB1*07:01L
  REGION 1..12: note = CONT. FROM ABOVE: HLA-DRB1*04:08L
NKVTLADAGFIK

SEQ ID NO: 20556 - protein, 11 aa, Severe acute respiratory syndrome coronavirus 2
  REGION 1..11: note = Table B: HLA-DRB1*08:77L
ALLAGTITSGW

SEQ ID NO: 20557 - protein, 15 aa, Severe acute respiratory syndrome coronavirus 2
  REGION 1..15: note = Table B: HLA-DRB1*08:77L HLA-DRB3*02:01L HLA-DRB1*11:02L HLA-DQA1*01-B1*05L HLA-DPA1*01:03-B1*04:01L HLA-DRB1*09:01L HLA-DRB1*12:02L HLA-DRB1*08:02L
TQQLIRAAEIRASAN

SEQ ID NO: 20558 - protein, 15 aa, Severe acute respiratory syndrome coronavirus 2
  REGION 1..15: note = Table B: HLA-DRB1*08:77L HLA-DPA1*03:01-B1*04:02L HLA-DRB1*11:02L HLA-DQA1*01:01-B1*05:01L HLA-DRB1*09:01L HLA-DPA1*01:03-B1*104:01L HLA-DRB1*08:02L
GKGYHLMSFPQSAPH

SEQ ID NO: 20559 - protein, 18 aa, Severe acute respiratory syndrome coronavirus 2
  REGION 1..18: note = Table B: HLA-DRB1*08:77L HLA-DRB1*03:01L HLA-DRB1*11:02L HLA-DRB1*11:03L HLA-DRB1*11:04L HLA-DRB4*01:01L HLA-DPA1*01:03-B1*04:01L HLA-DRB1*04:10L HLA-DRB1*09:01L HLA-DRB3*01:01L HLA-DPA1*01:03-B1*02:01L HLA-DRB1*08:02L
VPAQEKNFTTAPAICHDG

SEQ ID NO: 20560 - protein, 15 aa, Severe acute respiratory syndrome coronavirus 2
  REGION 1..15: note = Table B: HLA-DRB1*08:77L HLA-DRB1*13:01L HLA-DRB4*01:01L
GTHWFVTQRNFYEPQ

SEQ ID NO: 20561 - protein, 11 aa, Severe acute respiratory syndrome coronavirus 2
  REGION 1..11: note = Table B: HLA-DRB1*08:77L HLA-DRB1*03:01L HLA-DRB1*11:02L HLA-DRB1*14:02L HLA-DQA1*01-B1*05L HLA-DRB4*01:01L HLA-DPA1*01:03-B1*04:01L HLA-DRB1*16:01L HLA-DRB1*15:03L
VAAGLEAPFLY

SEQ ID NO: 20562 - protein, 12 aa, Severe acute respiratory syndrome coronavirus 2
  REGION 1..12: note = Table B: HLA-DRB1*08:77L HLA-DPA1*01:03-B1*03:01L HLA-DRB1*14:01L HLA-DRB1*11:03L HLA-DRB1*11:04L HLA-DRB5*01:01L HLA-DQA1*05:05-B1*03:19L HLA-DRB1*12:02L HLA-DRB1*10:01L HLA-DQA1*01:03-B1*06:01L HLA-DRB1*04:08L
STQLSTDTGVEH

SEQ ID NO: 20563 - protein, 12 aa, Severe acute respiratory syndrome coronavirus 2
  REGION 1..12: note = Table B: HLA-DRB1*08:77L HLA-DRB3*02:01L HLA-DPA1*01:03-B1*03:01L HLA-DRB1*11:03L HLA-DRB1*12:02L HLA-DPA1*02:01-B1*13:01L HLA-DRB1*07:01L
VKNLNSSRVPDL

SEQ ID NO: 20564 - protein, 11 aa, Severe acute respiratory syndrome coronavirus 2
  REGION 1..11: note = Table B: HLA-DRB1*08:77L HLA-DRB3*02:01L HLA-DPA1*01:03-B1*03:01L HLA-DQA1*01-B1*05L HLA-DRB4*01:01L HLA-DQA1*03:01-B1*03:02L HLA-DPA1*01:03-B1*104:01L HLA-DRB1*16:01L
EEVQELYSPIF

SEQ ID NO: 20565 - protein, 10 aa, Severe acute respiratory syndrome coronavirus 2
  REGION 1..10: note = Table B: HLA-DRB1*08:77L HLA-DPA1*01:03-B1*03:01L HLA-DRB1*03:01L HLA-DRB1*11:02L HLA-DQA1*01-B1*05L HLA-DQA1*05:05-B1*03:19M HLA-DQA1*05:01-B1*02:01L HLA-DPA1*01:03-B1*104:01L HLA-DRB1*16:01L
VDDPCPIHFY

SEQ ID NO: 20566 - protein, 13 aa, Severe acute respiratory syndrome coronavirus 2
  REGION 1..13: note = Table B: HLA-DRB1*08:77L HLA-DRB3*02:01L HLA-DPA1*03:01-B1*04:02L HLA-DRB1*11:03L HLA-DQA1*01:01-B1*05:01L HLA-DQA1*01-B1*05L HLA-DRB1*09:01L HLA-DRB1*12:02L HLA-DRB3*01:01L HLA-DPA1*01:03-B1*02:01L
  REGION 1..13: note = CONT. FROM ABOVE: HLA-DPA1*01:03-B1*104:01L HLA-DRB1*07:01L HLA- DRB1*08:02L HLA-DRB1*08:03L
ASWFTALTQHGKE

SEQ ID NO: 20567 - protein, 16 aa, Severe acute respiratory syndrome coronavirus 2
  REGION 1..16: note = Table B: HLA-DRB1*08:77L HLA-DRB1*13:01L HLA-DQA1*05:05-B1*03:116L HLA-DRB1*15:01L
GTDYKHWPQIAQFAPS

SEQ ID NO: 20568 - protein, 16 aa, Severe acute respiratory syndrome coronavirus 2
  REGION 1..16: note = Table B: HLA-DRB1*08:77L HLA-DRB3*02:01L HLA-DRB1*11:02L HLA-DRB4*01:01L HLA-DQA1*05:05-B1*03:116L HLA-DRB1*04:10L HLA-DRB1*09:01L HLA-DRB1*08:02L
DPNFKDQVILLNKHID

SEQ ID NO: 20569 - protein, 11 aa, Severe acute respiratory syndrome coronavirus 2
  REGION 1..11: note = Table B: HLA-DRB3*02:01L HLA-DRB1*08:01L HLA-DRB1*09:01L HLA-DRB1*08:03L
GVLPQLEQPYV

SEQ ID NO: 20570 - protein, 18 aa, Severe acute respiratory syndrome coronavirus 2
  REGION 1..18: note = Table B: HLA-DRB3*02:01L HLA-DRB1*14:02L HLA-DRB4*01:01L
APHGHVMVELVAELEGIQ

SEQ ID NO: 20571 - protein, 13 aa, Severe acute respiratory syndrome coronavirus 2
  REGION 1..13: note = Table B: HLA-DRB3*02:01L HLA-DRB1*11:02L HLA-DRB1*11:03L HLA-DQA1*01:01-B1*05:01L HLA-DRB1*09:01L HLA-DRB1*12:02L HLA-DRB1*07:01L HLA-DRB1*08:02L HLA-DRB1*08:03L
IAWYTERSEKSYE

SEQ ID NO: 20572 - protein, 13 aa, Severe acute respiratory syndrome coronavirus 2
  REGION 1..13: note = Table B: HLA-DRB3*02:01L
WYTERSEKSYELQ

SEQ ID NO: 20573 - protein, 18 aa, Severe acute respiratory syndrome coronavirus 2
  REGION 1..18: note = Table B: HLA-DRB3*02:01L HLA-DRB1*11:02L HLA-DRB1*10:01L
LPQNAVVKIYCPACHNSE

SEQ ID NO: 20574 - protein, 12 aa, Severe acute respiratory syndrome coronavirus 2
  REGION 1..12: note = Table B: HLA-DRB3*02:01L HLA-DPA1*03:01-B1*04:02L HLA-DRB1*14:01L HLA-DPA1*03:01-B1*105:01L
VNINIVGDFKLN

SEQ ID NO: 20575 - protein, 13 aa, Severe acute respiratory syndrome coronavirus 2
  REGION 1..13: note = Table B: HLA-DRB3*02:01L HLA-DRB1*11:03L HLA-DQA1*05:01-B1*02:01L HLA-DPA1*01:03-B1*104:01L HLA-DQA1*05:05-B1*03:01L HLA-DRB1*10:01L
GLDYKAFKQIVES

SEQ ID NO: 20576 - protein, 15 aa, Severe acute respiratory syndrome coronavirus 2
  REGION 1..15: note = Table B: HLA-DRB3*02:01L HLA-DRB1*15:01L
LKPVLDWLEEKFKEG

SEQ ID NO: 20577 - protein, 16 aa, Severe acute respiratory syndrome coronavirus 2
  REGION 1..16: note = Table B: HLA-DRB3*02:01L HLA-DQA1*05:05-B1*03:116L HLA-DPA1*01:03-B1*104:01L
GGQIVTCAKEIKESVQ

SEQ ID NO: 20578 - protein, 15 aa, Severe acute respiratory syndrome coronavirus 2
  REGION 1..15: note = Table B: HLA-DRB3*02:01L
TEEVVLKTGDLQPLE

SEQ ID NO: 20579 - protein, 16 aa, Severe acute respiratory syndrome coronavirus 2
  REGION 1..16: note = Table B: HLA-DRB3*02:01L
KVTFGDDTVIEVQGYK

SEQ ID NO: 20580 - protein, 16 aa, Severe acute respiratory syndrome coronavirus 2
  REGION 1..16: note = Table B: HLA-DRB3*02:01L HLA-DRB1*14:02L HLA-DQA1*05:05-B1*03:19L HLA-DPA1*01:03-B1*04:02L HLA-DPA1*01:03-B1*104:01L HLA-DRB1*08:03L
VIKTLQPVSELLTPLG

SEQ ID NO: 20581 - protein, 18 aa, Severe acute respiratory syndrome coronavirus 2
  REGION 1..18: note = Table B: HLA-DRB3*02:01L HLA-DPA1*03:01-B1*04:02L HLA-DPA1*01:03-B1*04:01L HLA-DQA1*05:05-B1*03:116L HLA-DPA1*01:03-B1*104:01L HLA-DPA1*01:02-B1*04:01L HLA-DRB1*08:02L
EPSTQYEYGTEDDYQGKP

SEQ ID NO: 20582 - protein, 15 aa, Severe acute respiratory syndrome coronavirus 2
  REGION 1..15: note = Table B: HLA-DRB3*02:01L HLA-DRB1*11:04L HLA-DRB1*08:02L
TEDDYQGKPLEFGAT

SEQ ID NO: 20583 - protein, 13 aa, Severe acute respiratory syndrome coronavirus 2
  REGION 1..13: note = Table B: HLA-DRB3*02:01L HLA-DPA1*01:03-B1*03:01L HLA-DRB1*11:02L HLA-DRB1*11:03L HLA-DRB1*11:04L HLA-DRB1*14:02L HLA-DQA1*01:01-B1*05:01L HLA-DQA1*05:01-B1*02:01L HLA-DQA1*05:05-B1*03:116L HLA-DRB1*04:10L HLA-DRB3*01:01L
  REGION 1..13: note = CONT. FROM ABOVE: HLA-DRB1*14:54L HLA-DPA1*01:03-B1*104:01L HLA- DRB1*10:01L HLA-DRB1*08:02L
VNSFSGYLKLTDN

SEQ ID NO: 20584 - protein, 13 aa, Severe acute respiratory syndrome coronavirus 2
  REGION 1..13: note = Table B: HLA-DRB3*02:01L HLA-DRB1*11:04L HLA-DRB1*14:02L HLA-DRB1*11:01L HLA-DPA1*01:03-B1*04:01L HLA-DPA1*01:03-B1*04:02L HLA-DRB3*01:01L HLA-DPA1*01:03-B1*104:01L HLA-DRB1*07:01L HLA-DRB1*10:01L
  REGION 1..13: note = CONT. FROM ABOVE: HLA-DRB1*08:03L
VYIKNADIVEEAK

SEQ ID NO: 20585 - protein, 13 aa, Severe acute respiratory syndrome coronavirus 2
  REGION 1..13: note = Table B: HLA-DRB3*02:01L HLA-DPA1*01:03-B1*03:01L HLA-DRB1*14:02L HLA-DRB1*11:01L HLA-DRB5*01:01L HLA-DRB1*04:10L HLA-DRB1*09:01L HLA-DRB3*01:01L HLA-DPA1*02:01-B1*13:01L HLA-DPA1*01:02-B1*04:01L HLA-DRB1*10:01L
  REGION 1..13: note = CONT. FROM ABOVE: HLA-DQA1*01:03-B1*06:01L HLA-DRB1*08:03L
ANVYLKHGGGVAG

SEQ ID NO: 20586 - protein, 15 aa, Severe acute respiratory syndrome coronavirus 2
  REGION 1..15: note = Table B: HLA-DRB3*02:01L
DTVRTNVYLAVFDKN

SEQ ID NO: 20587 - protein, 13 aa, Severe acute respiratory syndrome coronavirus 2
  REGION 1..13: note = Table B: HLA-DRB3*02:01L
DKNLYDKLVSSFL

SEQ ID NO: 20588 - protein, 16 aa, Severe acute respiratory syndrome coronavirus 2
  REGION 1..16: note = Table B: HLA-DRB3*02:01L HLA-DRB1*14:02L HLA-DQA1*05:05-B1*03:19L
YDKLVSSFLEMKSEKQ

SEQ ID NO: 20589 - protein, 14 aa, Severe acute respiratory syndrome coronavirus 2
  REGION 1..14: note = Table B: HLA-DRB3*02:01L HLA-DRB1*03:01L HLA-DRB1*11:02L HLA-DPA1*01:03-B1*104:01L
VSSFLEMKSEKQVE

SEQ ID NO: 20590 - protein, 16 aa, Severe acute respiratory syndrome coronavirus 2
  REGION 1..16: note = Table B: HLA-DRB3*02:01L HLA-DRB1*11:02L HLA-DPA1*01:03-B1*04:01L HLA-DRB1*09:01L HLA-DRB1*08:03L HLA-DRB1*15:01L
ENLLLYIDINGNLHPD

SEQ ID NO: 20591 - protein, 14 aa, Severe acute respiratory syndrome coronavirus 2
  REGION 1..14: note = Table B: HLA-DRB3*02:01L HLA-DPA1*01:03-B1*04:02L HLA-DPA1*01:03-B1*104:01L
YIDINGNLHPDSAT

SEQ ID NO: 20592 - protein, 14 aa, Severe acute respiratory syndrome coronavirus 2
  REGION 1..14: note = Table B: HLA-DRB3*02:01L HLA-DRB4*01:01L HLA-DPA1*01:03-B1*04:02L
DAPYIVGDVVQEGV

SEQ ID NO: 20593 - protein, 15 aa, Severe acute respiratory syndrome coronavirus 2
  REGION 1..15: note = Table B: HLA-DRB3*02:01L
AKALRKVPTDNYITT

SEQ ID NO: 20594 - protein, 13 aa, Severe acute respiratory syndrome coronavirus 2
  REGION 1..13: note = Table B: HLA-DRB3*02:01L HLA-DRB1*11:01L HLA-DPA1*01:03-B1*04:02L HLA-DRB3*01:01L HLA-DPA1*01:03-B1*104:01L HLA-DPA1*01:02-B1*04:01L HLA-DRB1*07:01L HLA-DQA1*01:03-B1*06:01L HLA-DRB1*08:02L
KSAFYILPSIISN

SEQ ID NO: 20595 - protein, 16 aa, Severe acute respiratory syndrome coronavirus 2
  REGION 1..16: note = Table B: HLA-DRB3*02:01L HLA-DPA1*03:01-B1*04:02L HLA-DRB1*03:01L HLA-DRB1*11:02L HLA-DRB1*11:03L HLA-DQA1*01-B1*05L HLA-DPA1*01:03-B1*04:01L HLA-DRB1*09:01L
IQRKYKGIKIQEGVVD

SEQ ID NO: 20596 - protein, 12 aa, Severe acute respiratory syndrome coronavirus 2
  REGION 1..12: note = Table B: HLA-DRB3*02:01L HLA-DRB1*14:01L HLA-DRB1*14:02L HLA-DPA1*02:01-B1*13:01L
IQEGVVDYGARF

SEQ ID NO: 20597 - protein, 16 aa, Severe acute respiratory syndrome coronavirus 2
  REGION 1..16: note = Table B: HLA-DRB3*02:01L HLA-DRB4*01:01L
SKTTVASLINTLNDLN

SEQ ID NO: 20598 - protein, 14 aa, Severe acute respiratory syndrome coronavirus 2
  REGION 1..14: note = Table B: HLA-DRB3*02:01L HLA-DPA1*03:01-B1*04:02L
AVTAYNGYLTSSSK

SEQ ID NO: 20599 - protein, 15 aa, Severe acute respiratory syndrome coronavirus 2
  REGION 1..15: note = Table B: HLA-DRB3*02:01L HLA-DRB1*14:01L HLA-DRB1*11:01L HLA-DRB1*04:10L HLA-DRB3*01:01L HLA-DRB1*08:03L
AGSYKDWSYSGQSTQ

SEQ ID NO: 20600 - protein, 14 aa, Severe acute respiratory syndrome coronavirus 2
  REGION 1..14: note = Table B: HLA-DRB3*02:01L HLA-DRB3*01:01L
TTFHLDGEVITFDN

SEQ ID NO: 20601 - protein, 13 aa, Severe acute respiratory syndrome coronavirus 2
  REGION 1..13: note = Table B: HLA-DRB3*02:01L HLA-DPA1*03:01-B1*04:02L HLA-DRB1*08:03L
VDNINLHTQVVDM

SEQ ID NO: 20602 - protein, 15 aa, Severe acute respiratory syndrome coronavirus 2
  REGION 1..15: note = Table B: HLA-DRB3*02:01L HLA-DPA1*01:03-B1*03:01L HLA-DRB1*11:01L HLA-DRB1*07:01L
GPTYLDGADVTKIKP

SEQ ID NO: 20603 - protein, 17 aa, Severe acute respiratory syndrome coronavirus 2
  REGION 1..17: note = Table B: HLA-DRB3*02:01L HLA-DPA1*01:03-B1*104:01L
DPSFLGRYMSALNHTKK

SEQ ID NO: 20604 - protein, 13 aa, Severe acute respiratory syndrome coronavirus 2
  REGION 1..13: note = Table B: HLA-DRB3*02:01L
VGELGDVRETMSY

SEQ ID NO: 20605 - protein, 12 aa, Severe acute respiratory syndrome coronavirus 2
  REGION 1..12: note = Table B: HLA-DRB3*02:01L
QTTLKGVEAVMY

SEQ ID NO: 20606 - protein, 16 aa, Severe acute respiratory syndrome coronavirus 2
  REGION 1..16: note = Table B: HLA-DRB3*02:01L HLA-DPA1*03:01-B1*04:02L HLA-DRB1*11:02L HLA-DRB4*01:01L HLA-DPA1*02:01-B1*13:01L HLA-DPA1*01:03-B1*104:01L
ETLYCIDGALLTKSSE

SEQ ID NO: 20607 - protein, 17 aa, Severe acute respiratory syndrome coronavirus 2
  REGION 1..17: note = Table B: HLA-DRB3*02:01L HLA-DPA1*01:03-B1*04:01L HLA-DPA1*01:03-B1*104:01L HLA-DRB1*08:03L
DNYYKKDNSYFTEQPID

SEQ ID NO: 20608 - protein, 12 aa, Severe acute respiratory syndrome coronavirus 2
  REGION 1..12: note = Table B: HLA-DRB3*02:01L
LVPNQPYPNASF

SEQ ID NO: 20609 - protein, 15 aa, Severe acute respiratory syndrome coronavirus 2
  REGION 1..15: note = Table B: HLA-DRB3*02:01L HLA-DRB1*14:02L HLA-DPA1*02:01-B1*13:01L
ADDLNQLTGYKKPAS

SEQ ID NO: 20610 - protein, 13 aa, Severe acute respiratory syndrome coronavirus 2
  REGION 1..13: note = Table B: HLA-DRB3*02:01L HLA-DQA1*05:05-B1*03:01L
VWHVNNATNKATY

SEQ ID NO: 20611 - protein, 11 aa, Severe acute respiratory syndrome coronavirus 2
  REGION 1..11: note = Table B: HLA-DRB3*02:01L HLA-DRB1*14:54L
DIILKPANNSL

SEQ ID NO: 20612 - protein, 13 aa, Severe acute respiratory syndrome coronavirus 2
  REGION 1..13: note = Table B: HLA-DRB3*02:01L HLA-DQA1*01-B1*05L HLA-DQA1*05:05-B1*03:19L HLA-DPA1*02:01-B1*13:01L HLA-DQA1*05:05-B1*03:01L HLA-DRB1*07:01L
VLGLKTLATHGLA

SEQ ID NO: 20613 - protein, 12 aa, Severe acute respiratory syndrome coronavirus 2
  REGION 1..12: note = Table B: HLA-DRB3*02:01L HLA-DPA1*01:03-B1*03:01L HLA-DRB1*11:03L HLA-DRB1*11:04L HLA-DRB5*01:01L HLA-DQA1*05:01-B1*02:01L HLA-DRB1*04:10L HLA-DRB1*12:02L HLA-DQA1*05:05-B1*03:01L HLA-DRB1*07:01L HLA-DRB1*10:01L
  REGION 1..12: note = CONT. FROM ABOVE: HLA-DRB1*04:08L
GYLNSTNVTIAT

SEQ ID NO: 20614 - protein, 12 aa, Severe acute respiratory syndrome coronavirus 2
  REGION 1..12: note = Table B: HLA-DRB3*02:01L HLA-DQA1*01-B1*05L HLA-DQA1*05:05-B1*03:01L
TIQITISSFKWD

SEQ ID NO: 20615 - protein, 13 aa, Severe acute respiratory syndrome coronavirus 2
  REGION 1..13: note = Table B: HLA-DRB3*02:01L HLA-DRB1*11:02L
YYVWKSYVHVVDG

SEQ ID NO: 20616 - protein, 13 aa, Severe acute respiratory syndrome coronavirus 2
  REGION 1..13: note = Table B: HLA-DRB3*02:01L HLA-DPA1*03:01-B1*04:02L HLA-DQA1*01:01-B1*05:01L HLA-DQA1*05:05-B1*03:19L HLA-DPA1*01:03-B1*04:02L HLA-DPA1*01:03-B1*104:01L HLA-DPA1*01:02-B1*04:01L HLA-DRB1*08:02L
LSHFVNLDNLRAN

SEQ ID NO: 20617 - protein, 12 aa, Severe acute respiratory syndrome coronavirus 2
  REGION 1..12: note = Table B: HLA-DRB3*02:01L
EESSAKSASVYY

SEQ ID NO: 20618 - protein, 13 aa, Severe acute respiratory syndrome coronavirus 2
  REGION 1..13: note = Table B: HLA-DRB3*02:01L HLA-DRB1*14:54L
EVAVKMFDAYVNT

SEQ ID NO: 20619 - protein, 13 aa, Severe acute respiratory syndrome coronavirus 2
  REGION 1..13: note = Table B: HLA-DRB3*02:01L
VAVKMFDAYVNTF

SEQ ID NO: 20620 - protein, 14 aa, Severe acute respiratory syndrome coronavirus 2
  REGION 1..14: note = Table B: HLA-DRB3*02:01L HLA-DPA1*01:03-B1*03:01L
TAEAELAKNVSLDN

SEQ ID NO: 20621 - protein, 13 aa, Severe acute respiratory syndrome coronavirus 2
  REGION 1..13: note = Table B: HLA-DRB3*02:01L HLA-DRB1*03:01L HLA-DRB1*14:01L HLA-DRB1*08:01L HLA-DPA1*01:03-B1*104:01L HLA-DRB1*08:03L
FVDSDVETKDVVE

SEQ ID NO: 20622 - protein, 14 aa, Severe acute respiratory syndrome coronavirus 2
  REGION 1..14: note = Table B: HLA-DRB3*02:01L HLA-DPA1*01:03-B1*03:01L HLA-DRB1*03:01L HLA-DRB1*11:03L HLA-DRB1*14:02L HLA-DQA1*05:05-B1*03:19L HLA-DPA1*01:03-B1*04:02L HLA-DPA1*02:01-B1*13:01L HLA-DPA1*01:03-B1*02:01L
  REGION 1..14: note = CONT. FROM ABOVE: HLA-DRB1*07:01L
YMLTYNKVENMTPR

SEQ ID NO: 20623 - protein, 16 aa, Severe acute respiratory syndrome coronavirus 2
  REGION 1..16: note = Table B: HLA-DRB3*02:01L HLA-DPA1*01:03-B1*03:01L
ITPVHVMSKHTDFSSE

SEQ ID NO: 20624 - protein, 18 aa, Severe acute respiratory syndrome coronavirus 2
  REGION 1..18: note = Table B: HLA-DRB3*02:01L HLA-DPA1*01:03-B1*04:01L HLA-DRB1*09:01L HLA-DPA1*01:03-B1*104:01L
TPVHVMSKHTDFSSEIIG

SEQ ID NO: 20625 - protein, 18 aa, Severe acute respiratory syndrome coronavirus 2
  REGION 1..18: note = Table B: HLA-DRB3*02:01L HLA-DPA1*03:01-B1*04:02L HLA-DRB1*14:02L HLA-DPA1*01:03-B1*04:02L
VTRDIASTDTCFANKHAD

SEQ ID NO: 20626 - protein, 16 aa, Severe acute respiratory syndrome coronavirus 2
  REGION 1..16: note = Table B: HLA-DRB3*02:01L HLA-DRB1*10:01L
NGDFLHFLPRVFSAVG

SEQ ID NO: 20627 - protein, 14 aa, Severe acute respiratory syndrome coronavirus 2
  REGION 1..14: note = Table B: HLA-DRB3*02:01L HLA-DRB1*11:03L HLA-DRB1*11:01L HLA-DRB1*07:01L HLA-DRB1*10:01L
EGSVAYESLRPDTR

SEQ ID NO: 20628 - protein, 15 aa, Severe acute respiratory syndrome coronavirus 2
  REGION 1..15: note = Table B: HLA-DRB3*02:01L HLA-DRB1*07:01L
VRVVTTFDSEYCRHG

SEQ ID NO: 20629 - protein, 12 aa, Severe acute respiratory syndrome coronavirus 2
  REGION 1..12: note = Table B: HLA-DRB3*02:01L
YSFLPGVYSVIY

SEQ ID NO: 20630 - protein, 14 aa, Severe acute respiratory syndrome coronavirus 2
  REGION 1..14: note = Table B: HLA-DRB3*02:01L HLA-DRB3*01:01L
STKHFYWFFSNYLK

SEQ ID NO: 20631 - protein, 16 aa, Severe acute respiratory syndrome coronavirus 2
  REGION 1..16: note = Table B: HLA-DRB3*02:01L HLA-DPA1*01:03-B1*03:01L HLA-DRB1*11:02L HLA-DRB1*14:02L HLA-DQA1*05:05-B1*03:01L
KHFYWFFSNYLKRRVV

SEQ ID NO: 20632 - protein, 12 aa, Severe acute respiratory syndrome coronavirus 2
  REGION 1..12: note = Table B: HLA-DRB3*02:01L HLA-DRB1*14:01L HLA-DPA1*01:03-B1*104:01L HLA-DQA1*05:05-B1*03:01L HLA-DRB1*04:08L
RVVFNGVSFSTF

SEQ ID NO: 20633 - protein, 12 aa, Severe acute respiratory syndrome coronavirus 2
  REGION 1..12: note = Table B: HLA-DRB3*02:01L HLA-DQA1*03:01-B1*03:02L HLA-DQA1*05:05-B1*03:01L HLA-DRB1*04:08L
VVFNGVSFSTFE

SEQ ID NO: 20634 - protein, 16 aa, Severe acute respiratory syndrome coronavirus 2
  REGION 1..16: note = Table B: HLA-DRB3*02:01L HLA-DRB1*11:04L HLA-DRB1*11:01L
YLKLRSDVLLPLTQYN

SEQ ID NO: 20635 - protein, 13 aa, Severe acute respiratory syndrome coronavirus 2
  REGION 1..13: note = Table B: HLA-DRB3*02:01L
YKYFSGAMDTTSY

SEQ ID NO: 20636 - protein, 12 aa, Severe acute respiratory syndrome coronavirus 2
  REGION 1..12: note = Table B: HLA-DRB3*02:01L
VRIQPGQTFSVL

SEQ ID NO: 20637 - protein, 15 aa, Severe acute respiratory syndrome coronavirus 2
  REGION 1..15: note = Table B: HLA-DRB3*02:01L HLA-DRB1*12:02L
LPTGVHAGTDLEGNF

SEQ ID NO: 20638 - protein, 16 aa, Severe acute respiratory syndrome coronavirus 2
  REGION 1..16: note = Table B: HLA-DRB3*02:01L HLA-DRB1*14:02L HLA-DPA1*01:03-B1*104:01L
GTDLEGNFYGPFVDRQ

SEQ ID NO: 20639 - protein, 13 aa, Severe acute respiratory syndrome coronavirus 2
  REGION 1..13: note = Table B: HLA-DRB3*02:01L
AWLYAAVINGDRW

SEQ ID NO: 20640 - protein, 13 aa, Severe acute respiratory syndrome coronavirus 2
  REGION 1..13: note = Table B: HLA-DRB3*02:01L HLA-DPA1*01:03-B1*04:01L HLA-DPA1*01:03-B1*04:02L
FLNRFTTTLNDFN

SEQ ID NO: 20641 - protein, 16 aa, Severe acute respiratory syndrome coronavirus 2
  REGION 1..16: note = Table B: HLA-DRB3*02:01L HLA-DRB1*08:02L
LNDFNLVAMKYNYEPL

SEQ ID NO: 20642 - protein, 14 aa, Severe acute respiratory syndrome coronavirus 2
  REGION 1..14: note = Table B: HLA-DRB3*02:01L HLA-DRB1*11:03L HLA-DRB1*14:02L HLA-DQA1*01:01-B1*05:01L HLA-DQA1*05:05-B1*03:19L HLA-DRB1*12:02L HLA-DPA1*01:03-B1*104:01L HLA-DQA1*05:05-B1*03:01L HLA-DRB1*07:01L HLA-DRB1*10:01L
VAMKYNYEPLTQDH

SEQ ID NO: 20643 - protein, 17 aa, Severe acute respiratory syndrome coronavirus 2
  REGION 1..17: note = Table B: HLA-DRB3*02:01L
NGRTILGSALLEDEFTP

SEQ ID NO: 20644 - protein, 14 aa, Severe acute respiratory syndrome coronavirus 2
  REGION 1..14: note = Table B: HLA-DRB3*02:01L HLA-DRB1*03:01L HLA-DRB1*11:02L HLA-DPA1*01:03-B1*02:01L
LGVYDYLVSTQEFR

SEQ ID NO: 20645 - protein, 13 aa, Severe acute respiratory syndrome coronavirus 2
  REGION 1..13: note = Table B: HLA-DRB3*02:01L
NDILLAKDTTEAF

SEQ ID NO: 20646 - protein, 13 aa, Severe acute respiratory syndrome coronavirus 2
  REGION 1..13: note = Table B: HLA-DRB3*02:01L HLA-DPA1*03:01-B1*04:02L HLA-DRB1*14:01L HLA-DRB1*11:03L HLA-DRB1*08:01L HLA-DPA1*01:03-B1*04:02L HLA-DRB1*12:02L HLA-DPA1*01:02-B1*04:01L HLA-DRB1*07:01L HLA-DRB1*10:01L
  REGION 1..13: note = CONT. FROM ABOVE: HLA-DRB1*15:03L
LDNRATLQAIASE

SEQ ID NO: 20647 - protein, 14 aa, Severe acute respiratory syndrome coronavirus 2
  REGION 1..14: note = Table B: HLA-DRB3*02:01L
IASEFSSLPSYAAF

SEQ ID NO: 20648 - protein, 14 aa, Severe acute respiratory syndrome coronavirus 2
  REGION 1..14: note = Table B: HLA-DRB3*02:01L HLA-DRB1*08:01L HLA-DPA1*01:03-B1*04:02L HLA-DRB1*12:02L HLA-DRB3*01:01L HLA-DRB1*07:01L HLA-DRB1*08:02L
ASEFSSLPSYAAFA

SEQ ID NO: 20649 - protein, 15 aa, Severe acute respiratory syndrome coronavirus 2
  REGION 1..15: note = Table B: HLA-DRB3*02:01L HLA-DRB1*08:01L HLA-DPA1*01:03-B1*04:02L HLA-DPA1*02:01-B1*13:01L HLA-DRB1*08:02L
NNIINNARDGCVPLN

SEQ ID NO: 20650 - protein, 17 aa, Severe acute respiratory syndrome coronavirus 2
  REGION 1..17: note = Table B: HLA-DRB3*02:01L
SPVALRQMSCAAGTTQT

SEQ ID NO: 20651 - protein, 14 aa, Severe acute respiratory syndrome coronavirus 2
  REGION 1..14: note = Table B: HLA-DRB3*02:01L
DDNALAYYNTTKGG

SEQ ID NO: 20652 - protein, 19 aa, Severe acute respiratory syndrome coronavirus 2
  REGION 1..19: note = Table B: HLA-DRB3*02:01L HLA-DRB1*14:54L
DTPKGPKVKYLYFIKGLNN

SEQ ID NO: 20653 - protein, 14 aa, Severe acute respiratory syndrome coronavirus 2
  REGION 1..14: note = Table B: HLA-DRB3*02:01L HLA-DPA1*03:01-B1*04:02L HLA-DPA1*01:03-B1*02:01L HLA-DPA1*01:03-B1*104:01L
GSLAATVRLQAGNA

SEQ ID NO: 20654 - protein, 16 aa, Severe acute respiratory syndrome coronavirus 2
  REGION 1..16: note = Table B: HLA-DRB3*02:01L HLA-DRB1*15:01L
NSTVLSFCAFAVDAAK

SEQ ID NO: 20655 - protein, 14 aa, Severe acute respiratory syndrome coronavirus 2
  REGION 1..14: note = Table B: HLA-DRB3*02:01L HLA-DRB1*08:01L
VDAAKAYKDYLASG

SEQ ID NO: 20656 - protein, 16 aa, Severe acute respiratory syndrome coronavirus 2
  REGION 1..16: note = Table B: HLA-DRB3*02:01L HLA-DPA1*03:01-B1*04:02L HLA-DRB1*03:01L HLA-DRB1*11:02L HLA-DRB1*14:02L HLA-DPA1*01:03-B1*04:01L HLA-DRB1*09:01L HLA-DPA1*01:02-B1*04:01L HLA-DRB1*07:01L HLA-DRB1*08:02L
GKYVQIPTTCANDPVG

SEQ ID NO: 20657 - protein, 13 aa, Severe acute respiratory syndrome coronavirus 2
  REGION 1..13: note = Table B: HLA-DRB3*02:01L HLA-DRB1*11:03L
ILRVYANLGERVR

SEQ ID NO: 20658 - protein, 18 aa, Severe acute respiratory syndrome coronavirus 2
  REGION 1..18: note = Table B: HLA-DRB3*02:01L
TEERLKLFDRYFKYWDQT

SEQ ID NO: 20659 - protein, 16 aa, Severe acute respiratory syndrome coronavirus 2
  REGION 1..16: note = Table B: HLA-DRB3*02:01L HLA-DRB4*01:01L HLA-DQA1*05:05-B1*03:116L HLA-DPA1*01:03-B1*104:01L HLA-DQA1*05:05-B1*03:01L HLA-DRB1*08:02L
SGNLLLDKRTTCFSVA

SEQ ID NO: 20660 - protein, 14 aa, Severe acute respiratory syndrome coronavirus 2
  REGION 1..14: note = Table B: HLA-DRB3*02:01L HLA-DPA1*01:03-B1*03:01L
VAALTNNVAFQTVK

SEQ ID NO: 20661 - protein, 11 aa, Severe acute respiratory syndrome coronavirus 2
  REGION 1..11: note = Table B: HLA-DRB3*02:01L HLA-DPA1*01:03-B1*104:01L HLA-DRB1*07:01L
VAFQTVKPGNF

SEQ ID NO: 20662 - protein, 12 aa, Severe acute respiratory syndrome coronavirus 2
  REGION 1..12: note = Table B: HLA-DRB3*02:01L HLA-DRB1*09:01L
DFYDFAVSKGFF

SEQ ID NO: 20663 - protein, 14 aa, Severe acute respiratory syndrome coronavirus 2
  REGION 1..14: note = Table B: HLA-DRB3*02:01L HLA-DRB3*01:01L
FYDFAVSKGFFKEG

SEQ ID NO: 20664 - protein, 15 aa, Severe acute respiratory syndrome coronavirus 2
  REGION 1..15: note = Table B: HLA-DRB3*02:01L HLA-DRB1*08:01L
DGNAAISDYDYYRYN

SEQ ID NO: 20665 - protein, 16 aa, Severe acute respiratory syndrome coronavirus 2
  REGION 1..16: note = Table B: HLA-DRB3*02:01L HLA-DPA1*03:01-B1*04:02L HLA-DRB1*03:01L HLA-DRB1*11:03L HLA-DQA1*05:01-B1*02:01L HLA-DRB1*13:01L HLA-DPA1*01:03-B1*02:01L HLA-DPA1*01:03-B1*104:01L HLA-DRB1*07:01L
GFPFNKWGKARLYYDS

SEQ ID NO: 20666 - protein, 18 aa, Severe acute respiratory syndrome coronavirus 2
  REGION 1..18: note = Table B: HLA-DRB3*02:01L HLA-DPA1*01:03-B1*03:01L HLA-DPA1*03:01-B1*04:02L HLA-DRB1*11:02L HLA-DQA1*05:05-B1*03:19L HLA-DPA1*01:03-B1*04:02L HLA-DPA1*01:03-B1*104:01L
MPNMLRIMASLVLARKHT

SEQ ID NO: 20667 - protein, 12 aa, Severe acute respiratory syndrome coronavirus 2
  REGION 1..12: note = Table B: HLA-DRB3*02:01L HLA-DRB1*11:04L
DKYVRNLQHRLY

SEQ ID NO: 20668 - protein, 18 aa, Severe acute respiratory syndrome coronavirus 2
  REGION 1..18: note = Table B: HLA-DRB3*02:01L
DVDTDFVNEFYAYLRKHF

SEQ ID NO: 20669 - protein, 18 aa, Severe acute respiratory syndrome coronavirus 2
  REGION 1..18: note = Table B: HLA-DRB3*02:01L HLA-DQA1*01-B1*05L HLA-DRB4*01:01L HLA-DQA1*05:05-B1*03:116L HLA-DRB1*09:01L HLA-DRB1*15:01L
GPHEFCSQHTMLVKQGDD

SEQ ID NO: 20670 - protein, 12 aa, Severe acute respiratory syndrome coronavirus 2
  REGION 1..12: note = Table B: HLA-DRB3*02:01L HLA-DRB1*15:01L
VYLPYPDPSRIL

SEQ ID NO: 20671 - protein, 17 aa, Severe acute respiratory syndrome coronavirus 2
  REGION 1..17: note = Table B: HLA-DRB3*02:01L
DAYPLTKHPNQEYADVF

SEQ ID NO: 20672 - protein, 14 aa, Severe acute respiratory syndrome coronavirus 2
  REGION 1..14: note = Table B: HLA-DRB3*02:01L HLA-DRB1*13:01L HLA-DPA1*01:03-B1*02:01L HLA-DRB1*08:03L
MLTNDNTSRYWEPE

SEQ ID NO: 20673 - protein, 15 aa, Severe acute respiratory syndrome coronavirus 2
  REGION 1..15: note = Table B: HLA-DRB3*02:01L
DNTSRYWEPEFYEAM

SEQ ID NO: 20674 - protein, 13 aa, Severe acute respiratory syndrome coronavirus 2
  REGION 1..13: note = Table B: HLA-DRB3*02:01L HLA-DRB1*14:02L HLA-DPA1*01:03-B1*04:02L
GDYILANTCTERL

SEQ ID NO: 20675 - protein, 15 aa, Severe acute respiratory syndrome coronavirus 2
  REGION 1..15: note = Table B: HLA-DRB3*02:01L HLA-DPA1*01:03-B1*04:02L
YRVTKNSKVQIGEYT

SEQ ID NO: 20676 - protein, 12 aa, Severe acute respiratory syndrome coronavirus 2
  REGION 1..12: note = Table B: HLA-DRB3*02:01L HLA-DRB1*11:03L HLA-DRB3*01:01L
DKFKVNSTLEQY

SEQ ID NO: 20677 - protein, 14 aa, Severe acute respiratory syndrome coronavirus 2
  REGION 1..14: note = Table B: HLA-DRB3*02:01L HLA-DPA1*01:03-B1*03:01L HLA-DRB1*14:02L HLA-DRB1*08:01L HLA-DPA1*02:01-B1*13:01L
EQYVFCTVNALPET

SEQ ID NO: 20678 - protein, 18 aa, Severe acute respiratory syndrome coronavirus 2
  REGION 1..18: note = Table B: HLA-DRB3*02:01L
LPAPRTLLTKGTLEPEYF

SEQ ID NO: 20679 - protein, 14 aa, Severe acute respiratory syndrome coronavirus 2
  REGION 1..14: note = Table B: HLA-DRB3*02:01L HLA-DRB5*01:01L HLA-DPA1*01:03-B1*04:02L HLA-DRB1*12:02L HLA-DRB1*08:02L HLA-DRB1*15:01L
SALVYDNKLKAHKD

SEQ ID NO: 20680 - protein, 13 aa, Severe acute respiratory syndrome coronavirus 2
  REGION 1..13: note = Table B: HLA-DRB3*02:01L HLA-DPA1*03:01-B1*04:02L HLA-DRB1*11:03L HLA-DRB1*14:02L HLA-DRB1*09:01L
GVNLVAVPTGYVD

SEQ ID NO: 20681 - protein, 15 aa, Severe acute respiratory syndrome coronavirus 2
  REGION 1..15: note = Table B: HLA-DRB3*02:01L HLA-DPA1*03:01-B1*04:02L HLA-DRB1*11:03L HLA-DRB1*14:02L HLA-DRB1*08:01L HLA-DPA1*01:03-B1*104:01L
VNLVAVPTGYVDTPN

SEQ ID NO: 20682 - protein, 14 aa, Severe acute respiratory syndrome coronavirus 2
  REGION 1..14: note = Table B: HLA-DRB3*02:01L HLA-DPA1*03:01-B1*04:02L HLA-DRB1*14:01L HLA-DPA1*01:03-B1*104:01L
DVQQWGFTGNLQSN

SEQ ID NO: 20683 - protein, 15 aa, Severe acute respiratory syndrome coronavirus 2
  REGION 1..15: note = Table B: HLA-DRB3*02:01L HLA-DRB1*03:01L HLA-DRB1*11:02L HLA-DRB4*01:01L HLA-DPA1*01:03-B1*04:01L HLA-DQA1*05:05-B1*03:116L HLA-DRB1*09:01L HLA-DRB1*08:02L
VQQWGFTGNLQSNHD

SEQ ID NO: 20684 - protein, 18 aa, Severe acute respiratory syndrome coronavirus 2
  REGION 1..18: note = Table B: HLA-DRB3*02:01L HLA-DRB1*11:02L HLA-DRB1*11:03L HLA-DRB1*09:01L HLA-DRB1*10:01L HLA-DRB1*08:02L HLA-DRB1*08:03L
VNKHAFHTPAFDKSAFVN

SEQ ID NO: 20685 - protein, 12 aa, Severe acute respiratory syndrome coronavirus 2
  REGION 1..12: note = Table B: HLA-DRB3*02:01L HLA-DRB1*11:03L HLA-DRB1*12:02L HLA-DRB1*14:54L
EVPVSIINNTVY

SEQ ID NO: 20686 - protein, 13 aa, Severe acute respiratory syndrome coronavirus 2
  REGION 1..13: note = Table B: HLA-DRB3*02:01L HLA-DPA1*01:03-B1*03:01L HLA-DQA1*05:05-B1*03:01L HLA-DRB1*07:01L
NIKPVPEVKILNN

SEQ ID NO: 20687 - protein, 17 aa, Severe acute respiratory syndrome coronavirus 2
  REGION 1..17: note = Table B: HLA-DRB3*02:01L HLA-DRB1*14:02L
APAHISTIGVCSMTDIA

SEQ ID NO: 20688 - protein, 14 aa, Severe acute respiratory syndrome coronavirus 2
  REGION 1..14: note = Table B: HLA-DRB3*02:01L HLA-DRB1*03:01L HLA-DRB1*11:02L HLA-DRB1*08:01L HLA-DRB5*01:01L HLA-DRB4*01:01L HLA-DPA1*01:03-B1*04:02L HLA-DRB3*01:01L HLA-DPA1*02:01-B1*13:01L HLA-DPA1*01:03-B1*104:01L
  REGION 1..14: note = CONT. FROM ABOVE: HLA-DRB1*07:01L HLA-DRB1*08:02L
GVLITEGSVKGLQP

SEQ ID NO: 20689 - protein, 11 aa, Severe acute respiratory syndrome coronavirus 2
  REGION 1..11: note = Table B: HLA-DRB3*02:01L HLA-DRB1*12:02L HLA-DRB1*07:01L
GVVQQLPETYF

SEQ ID NO: 20690 - protein, 11 aa, Severe acute respiratory syndrome coronavirus 2
  REGION 1..11: note = Table B: HLA-DRB3*02:01L HLA-DRB1*14:17L
VVQQLPETYFT

SEQ ID NO: 20691 - protein, 15 aa, Severe acute respiratory syndrome coronavirus 2
  REGION 1..15: note = Table B: HLA-DRB3*02:01L HLA-DPA1*01:03-B1*04:01L HLA-DPA1*01:03-B1*02:01L HLA-DQA1*05:05-B1*03:01L
DEFIERYKLEGYAFE

SEQ ID NO: 20692 - protein, 12 aa, Severe acute respiratory syndrome coronavirus 2
  REGION 1..12: note = Table B: HLA-DRB3*02:01L
DFIPMDSTVKNY

SEQ ID NO: 20693 - protein, 16 aa, Severe acute respiratory syndrome coronavirus 2
  REGION 1..16: note = Table B: HLA-DRB3*02:01L HLA-DRB1*04:08L
IPMDSTVKNYFITDAQ

SEQ ID NO: 20694 - protein, 13 aa, Severe acute respiratory syndrome coronavirus 2
  REGION 1..13: note = Table B: HLA-DRB3*02:01L HLA-DRB3*01:01L
VVKVTIDYTEISF

SEQ ID NO: 20695 - protein, 18 aa, Severe acute respiratory syndrome coronavirus 2
  REGION 1..18: note = Table B: HLA-DRB3*02:01L HLA-DQA1*05:05-B1*03:116L
SSEAFLIGCNYLGKPREQ

SEQ ID NO: 20696 - protein, 12 aa, Severe acute respiratory syndrome coronavirus 2
  REGION 1..12: note = Table B: HLA-DRB3*02:01L HLA-DRB1*04:08L
WRNTNPIQLSSY

SEQ ID NO: 20697 - protein, 14 aa, Severe acute respiratory syndrome coronavirus 2
  REGION 1..14: note = Table B: HLA-DRB3*02:01L HLA-DPA1*01:03-B1*03:01L HLA-DRB1*14:02L HLA-DPA1*01:03-B1*04:01L HLA-DRB1*07:01L
SSYSLFDMSKFPLK

SEQ ID NO: 20698 - protein, 12 aa, Severe acute respiratory syndrome coronavirus 2
  REGION 1..12: note = Table B: HLA-DRB3*02:01L HLA-DRB1*14:17L HLA-DRB1*04:08L
NPVLPFNDGVYF

SEQ ID NO: 20699 - protein, 19 aa, Severe acute respiratory syndrome coronavirus 2
  REGION 1..19: note = Table B: HLA-DRB3*02:01L
DPFLGVYYHKNNKSWMESE

SEQ ID NO: 20700 - protein, 16 aa, Severe acute respiratory syndrome coronavirus 2
  REGION 1..16: note = Table B: HLA-DRB3*02:01L HLA-DQA1*05:05-B1*03:116L HLA-DRB1*08:02L
FEYVSQPFLMDLEGKQ

SEQ ID NO: 20701 - protein, 16 aa, Severe acute respiratory syndrome coronavirus 2
  REGION 1..16: note = Table B: HLA-DRB3*02:01L HLA-DRB1*14:02L HLA-DQA1*05:01-B1*02:01L
QGNFKNLREFVFKNID

SEQ ID NO: 20702 - protein, 17 aa, Severe acute respiratory syndrome coronavirus 2
  REGION 1..17: note = Table B: HLA-DRB3*02:01L HLA-DRB1*03:01L HLA-DRB1*13:01L HLA-DPA1*01:03-B1*04:01L HLA-DRB1*07:01L HLA-DRB1*10:01L
FQTLLALHRSYLTPGDS

SEQ ID NO: 20703 - protein, 13 aa, Severe acute respiratory syndrome coronavirus 2
  REGION 1..13: note = Table B: HLA-DRB3*02:01L
FNATRFASVYAWN

SEQ ID NO: 20704 - protein, 16 aa, Severe acute respiratory syndrome coronavirus 2
  REGION 1..16: note = Table B: HLA-DRB3*02:01L HLA-DPA1*03:01-B1*04:02L HLA-DRB1*11:02L HLA-DRB1*14:02L HLA-DPA1*01:03-B1*04:02L
ATRFASVYAWNRKRIS

SEQ ID NO: 20705 - protein, 14 aa, Severe acute respiratory syndrome coronavirus 2
  REGION 1..14: note = Table B: HLA-DRB3*02:01L HLA-DRB1*11:02L HLA-DRB1*14:02L HLA-DQA1*01:01-B1*05:01L HLA-DRB1*08:01L HLA-DRB1*11:01L HLA-DRB1*09:01L HLA-DRB3*01:01L HLA-DPA1*01:03-B1*02:01L HLA-DRB1*07:01L HLA-DRB1*08:02L
VADYSVLYNSASFS

SEQ ID NO: 20706 - protein, 12 aa, Severe acute respiratory syndrome coronavirus 2
  REGION 1..12: note = Table B: HLA-DRB3*02:01L
SVLYNSASFSTF

SEQ ID NO: 20707 - protein, 15 aa, Severe acute respiratory syndrome coronavirus 2
  REGION 1..15: note = Table B: HLA-DRB3*02:01L
IAWNSNNLDSKVGGN

SEQ ID NO: 20708 - protein, 12 aa, Severe acute respiratory syndrome coronavirus 2
  REGION 1..12: note = Table B: HLA-DRB3*02:01L
SNNLDSKVGGNY

SEQ ID NO: 20709 - protein, 13 aa, Severe acute respiratory syndrome coronavirus 2
  REGION 1..13: note = Table B: HLA-DRB3*02:01L
GFQPTNGVGYQPY

SEQ ID NO: 20710 - protein, 16 aa, Severe acute respiratory syndrome coronavirus 2
  REGION 1..16: note = Table B: HLA-DRB3*02:01L HLA-DPA1*01:03-B1*03:01L HLA-DRB1*11:02L HLA-DRB1*11:01L HLA-DQA1*05:01-B1*02:01L HLA-DQA1*05:05-B1*03:01L
NKKFLPFQQFGRDIAD

SEQ ID NO: 20711 - protein, 15 aa, Severe acute respiratory syndrome coronavirus 2
  REGION 1..15: note = Table B: HLA-DRB3*02:01L HLA-DPA1*01:03-B1*03:01L HLA-DQA1*01:01-B1*05:01L HLA-DPA1*01:03-B1*104:01L
LPFQQFGRDIADTTD

SEQ ID NO: 20712 - protein, 15 aa, Severe acute respiratory syndrome coronavirus 2
  REGION 1..15: note = Table B: HLA-DRB3*02:01L HLA-DRB1*11:01L
IIAYTMSLGAENSVA

SEQ ID NO: 20713 - protein, 13 aa, Severe acute respiratory syndrome coronavirus 2
  REGION 1..13: note = Table B: HLA-DRB3*02:01L
EILPVSMTKTSVD

SEQ ID NO: 20714 - protein, 14 aa, Severe acute respiratory syndrome coronavirus 2
  REGION 1..14: note = Table B: HLA-DRB3*02:01L
LNRALTGIAVEQDK

SEQ ID NO: 20715 - protein, 13 aa, Severe acute respiratory syndrome coronavirus 2
  REGION 1..13: note = Table B: HLA-DRB3*02:01L HLA-DRB3*01:01L HLA-DPA1*01:03-B1*104:01L
RALTGIAVEQDKN

SEQ ID NO: 20716 - protein, 12 aa, Severe acute respiratory syndrome coronavirus 2
  REGION 1..12: note = Table B: HLA-DRB3*02:01L HLA-DQA1*05:05-B1*03:01L
AVEQDKNTQEVF

SEQ ID NO: 20717 - protein, 20 aa, Severe acute respiratory syndrome coronavirus 2
  REGION 1..20: note = Table B: HLA-DRB3*02:01L
PDPSKPSKRSFIEDLLFNKV

SEQ ID NO: 20718 - protein, 14 aa, Severe acute respiratory syndrome coronavirus 2
  REGION 1..14: note = Table B: HLA-DRB3*02:01L HLA-DRB1*11:02L HLA-DRB1*08:03L
VLYENQKLIANQFN

SEQ ID NO: 20719 - protein, 12 aa, Severe acute respiratory syndrome coronavirus 2
  REGION 1..12: note = Table B: HLA-DRB3*02:01L HLA-DRB1*04:10L HLA-DRB1*07:01L HLA-DRB1*10:01L HLA-DRB1*04:08L
DVVNQNAQALNT

SEQ ID NO: 20720 - protein, 14 aa, Severe acute respiratory syndrome coronavirus 2
  REGION 1..14: note = Table B: HLA-DRB3*02:01L HLA-DPA1*03:01-B1*04:02L HLA-DRB1*14:02L HLA-DPA1*02:01-B1*13:01L
VKQLSSNFGAISSV

SEQ ID NO: 20721 - protein, 13 aa, Severe acute respiratory syndrome coronavirus 2
  REGION 1..13: note = Table B: HLA-DRB3*02:01L HLA-DPA1*03:01-B1*04:02L HLA-DRB1*03:01L HLA-DRB1*11:02L HLA-DRB1*13:01L HLA-DRB4*01:01L HLA-DPA1*01:03-B1*04:02L HLA-DPA1*02:01-B1*13:01L HLA-DPA1*01:03-B1*02:01L HLA-DRB1*08:02L HLA-DRB1*15:01L
AEIRASANLAATK

SEQ ID NO: 20722 - protein, 13 aa, Severe acute respiratory syndrome coronavirus 2
  REGION 1..13: note = Table B: HLA-DRB3*02:01L HLA-DPA1*02:01-B1*13:01L
EIRASANLAATKM

SEQ ID NO: 20723 - protein, 15 aa, Severe acute respiratory syndrome coronavirus 2
  REGION 1..15: note = Table B: HLA-DRB3*02:01L HLA-DRB1*14:02L HLA-DRB1*11:01L HLA-DRB3*01:01L HLA-DRB1*10:01L HLA-DRB1*08:03L
VVFLHVTYVPAQEKN

SEQ ID NO: 20724 - protein, 12 aa, Severe acute respiratory syndrome coronavirus 2
  REGION 1..12: note = Table B: HLA-DRB3*02:01L
HVTYVPAQEKNF

SEQ ID NO: 20725 - protein, 17 aa, Severe acute respiratory syndrome coronavirus 2
  REGION 1..17: note = Table B: HLA-DRB3*02:01L HLA-DPA1*03:01-B1*04:02L HLA-DRB1*14:01L HLA-DQA1*01:01-B1*05:01L HLA-DRB1*08:01L HLA-DRB1*11:01L HLA-DPA1*01:03-B1*04:02L HLA-DPA1*01:02-B1*04:01L
VPAQEKNFTTAPAICHD

SEQ ID NO: 20726 - protein, 16 aa, Severe acute respiratory syndrome coronavirus 2
  REGION 1..16: note = Table B: HLA-DRB3*02:01L HLA-DPA1*03:01-B1*04:02L HLA-DRB1*11:02L HLA-DQA1*05:05-B1*03:19L HLA-DRB4*01:01L HLA-DPA1*01:03-B1*04:02L HLA-DQA1*05:05-B1*03:01L HLA-DQA1*01:03-B1*06:01L
APAICHDGKAHFPREG

SEQ ID NO: 20727 - protein, 11 aa, Severe acute respiratory syndrome coronavirus 2
  REGION 1..11: note = Table B: HLA-DRB3*02:01L HLA-DRB1*09:01L HLA-DPA1*01:03-B1*104:01L
GVFVSNGTHWF

SEQ ID NO: 20728 - protein, 16 aa, Severe acute respiratory syndrome coronavirus 2
  REGION 1..16: note = Table B: HLA-DRB3*02:01L HLA-DRB1*11:04L HLA-DRB1*14:02L HLA-DPA1*01:03-B1*04:01L HLA-DPA1*01:03-B1*04:02L HLA-DRB1*07:01L HLA-DRB1*10:01L
DPLQPELDSFKEELDK

SEQ ID NO: 20729 - protein, 12 aa, Severe acute respiratory syndrome coronavirus 2
  REGION 1..12: note = Table B: HLA-DRB3*02:01L
DGTTSPISEHDY

SEQ ID NO: 20730 - protein, 14 aa, Severe acute respiratory syndrome coronavirus 2
  REGION 1..14: note = Table B: HLA-DRB3*02:01L HLA-DQA1*01:01-B1*05:01L HLA-DRB1*04:10L HLA-DRB1*04:08L HLA-DRB1*08:03L
DYQIGGYTEKWESG

SEQ ID NO: 20731 - protein, 12 aa, Severe acute respiratory syndrome coronavirus 2
  REGION 1..12: note = Table B: HLA-DRB3*02:01L HLA-DRB1*11:03L HLA-DRB1*14:02L HLA-DRB1*11:01L HLA-DQA1*05:05-B1*03:19L HLA-DPA1*01:03-B1*04:01L HLA-DPA1*01:03-B1*02:01L HLA-DRB1*08:02L
FFIYNKIVDEPE

SEQ ID NO: 20732 - protein, 18 aa, Severe acute respiratory syndrome coronavirus 2
  REGION 1..18: note = Table B: HLA-DRB3*02:01L HLA-DRB1*03:01L HLA-DRB1*11:02L HLA-DRB1*08:02L
EHVQIHTIDGSSGVVNPV

SEQ ID NO: 20733 - protein, 12 aa, Severe acute respiratory syndrome coronavirus 2
  REGION 1..12: note = Table B: HLA-DRB3*02:01L HLA-DRB1*04:08L
NIVNVSLVKPSF

SEQ ID NO: 20734 - protein, 11 aa, Severe acute respiratory syndrome coronavirus 2
  REGION 1..11: note = Table B: HLA-DRB3*02:01L
VNVSLVKPSFY

SEQ ID NO: 20735 - protein, 15 aa, Severe acute respiratory syndrome coronavirus 2
  REGION 1..15: note = Table B: HLA-DRB3*02:01L HLA-DRB1*04:10L
ASQRVAGDSGFAAYS

SEQ ID NO: 20736 - protein, 13 aa, Severe acute respiratory syndrome coronavirus 2
  REGION 1..13: note = Table B: HLA-DRB3*02:01L HLA-DPA1*03:01-B1*04:02L HLA-DRB1*11:03L HLA-DRB1*14:02L HLA-DPA1*01:03-B1*04:02L HLA-DPA1*02:01-B1*13:01L HLA-DRB1*14:54L HLA-DPA1*01:03-B1*02:01L HLA-DRB1*08:02L HLA-DRB1*08:03L
DSGFAAYSRYRIG

SEQ ID NO: 20737 - protein, 17 aa, Severe acute respiratory syndrome coronavirus 2
  REGION 1..17: note = Table B: HLA-DRB3*02:01L HLA-DRB1*08:03L
SKSLTENKYSQLDEEQP

SEQ ID NO: 20738 - protein, 15 aa, Severe acute respiratory syndrome coronavirus 2
  REGION 1..15: note = Table B: HLA-DRB3*02:01L
SPKLFIRQEEVQELY

SEQ ID NO: 20739 - protein, 16 aa, Severe acute respiratory syndrome coronavirus 2
  REGION 1..16: note = Table B: HLA-DRB3*02:01L HLA-DRB1*11:03L HLA-DRB1*14:02L
ATKAYNVTQAFGRRGP

SEQ ID NO: 20740 - protein, 15 aa, Severe acute respiratory syndrome coronavirus 2
  REGION 1..15: note = Table B: HLA-DRB3*02:01L HLA-DRB1*11:04L
APSASAFFGMSRIGM

SEQ ID NO: 20741 - protein, 15 aa, Severe acute respiratory syndrome coronavirus 2
  REGION 1..15: note = Table B: HLA-DRB3*02:01L
GMSRIGMEVTPSGTW

SEQ ID NO: 20742 - protein, 16 aa, Severe acute respiratory syndrome coronavirus 2
  REGION 1..16: note = Table B: HLA-DRB3*02:01L
NKHIDAYKTFPPTEPK

SEQ ID NO: 20743 - protein, 18 aa, Severe acute respiratory syndrome coronavirus 2
  REGION 1..18: note = Table B: HLA-DRB3*02:01L
LPAADLDDFSKQLQQSMS

SEQ ID NO: 20744 - protein, 14 aa, Severe acute respiratory syndrome coronavirus 2
  REGION 1..14: note = Table B: HLA-DPA1*01:03-B1*03:01L HLA-DQA1*01:01-B1*05:01L HLA-DRB1*16:01L HLA-DRB1*04:08L
VEVEKGVLPQLEQP

SEQ ID NO: 20745 - protein, 17 aa, Severe acute respiratory syndrome coronavirus 2
  REGION 1..17: note = Table B: HLA-DPA1*01:03-B1*03:01L HLA-DPA1*01:03-B1*104:01L HLA-DQA1*01:03-B1*06:01L
EQPYVFIKRSDARTAPH

SEQ ID NO: 20746 - protein, 18 aa, Severe acute respiratory syndrome coronavirus 2
  REGION 1..18: note = Table B: HLA-DPA1*01:03-B1*03:01L
QPYVFIKRSDARTAPHGH

SEQ ID NO: 20747 - protein, 14 aa, Severe acute respiratory syndrome coronavirus 2
  REGION 1..14: note = Table B: HLA-DPA1*01:03-B1*03:01L
HGHVMVELVAELEG

SEQ ID NO: 20748 - protein, 13 aa, Severe acute respiratory syndrome coronavirus 2
  REGION 1..13: note = Table B: HLA-DPA1*01:03-B1*03:01L HLA-DPA1*02:01-B1*13:01L
LGDELGTDPYEDF

SEQ ID NO: 20749 - protein, 12 aa, Severe acute respiratory syndrome coronavirus 2
  REGION 1..12: note = Table B: HLA-DPA1*01:03-B1*03:01L HLA-DRB1*11:02L HLA-DQA1*05:05-B1*03:19L HLA-DPA1*01:03-B1*104:01L HLA-DRB1*16:01L
GTDPYEDFQENW

SEQ ID NO: 20750 - protein, 13 aa, Severe acute respiratory syndrome coronavirus 2
  REGION 1..13: note = Table B: HLA-DPA1*01:03-B1*03:01L HLA-DPA1*02:01-B1*13:01L HLA-DRB1*07:01L HLA-DRB1*15:03L
WNTKHSSGVTREL

SEQ ID NO: 20751 - protein, 15 aa, Severe acute respiratory syndrome coronavirus 2
  REGION 1..15: note = Table B: HLA-DPA1*01:03-B1*03:01L
AYTRYVDNNFCGPDG

SEQ ID NO: 20752 - protein, 15 aa, Severe acute respiratory syndrome coronavirus 2
  REGION 1..15: note = Table B: HLA-DPA1*01:03-B1*03:01L HLA-DPA1*03:01-B1*04:02L HLA-DRB1*15:03L
GPDGYPLECIKDLLA

SEQ ID NO: 20753 - protein, 19 aa, Severe acute respiratory syndrome coronavirus 2
  REGION 1..19: note = Table B: HLA-DPA1*01:03-B1*03:01L HLA-DPA1*01:03-B1*04:02L
PDGYPLECIKDLLARAGKA

SEQ ID NO: 20754 - protein, 16 aa, Severe acute respiratory syndrome coronavirus 2
  REGION 1..16: note = Table B: HLA-DPA1*01:03-B1*03:01L HLA-DPA1*01:03-B1*04:02L HLA-DRB1*15:03L
EGATTCGYLPQNAVVK

SEQ ID NO: 20755 - protein, 18 aa, Severe acute respiratory syndrome coronavirus 2
  REGION 1..18: note = Table B: HLA-DPA1*01:03-B1*03:01L HLA-DPA1*01:03-B1*04:01L HLA-DPA1*02:01-B1*13:01L HLA-DQA1*05:05-B1*03:01L
EGSEGLNDNLLEILQKEK

SEQ ID NO: 20756 - protein, 14 aa, Severe acute respiratory syndrome coronavirus 2
  REGION 1..14: note = Table B: HLA-DPA1*01:03-B1*03:01L
AIILASFSASTSAF

SEQ ID NO: 20757 - protein, 13 aa, Severe acute respiratory syndrome coronavirus 2
  REGION 1..13: note = Table B: HLA-DPA1*01:03-B1*03:01L HLA-DPA1*03:01-B1*04:02L HLA-DPA1*01:03-B1*04:01L HLA-DPA1*01:02-B1*04:01L HLA-DRB1*15:03L
FSASTSAFVETVK

SEQ ID NO: 20758 - protein, 11 aa, Severe acute respiratory syndrome coronavirus 2
  REGION 1..11: note = Table B: HLA-DPA1*01:03-B1*03:01L HLA-DQA1*01:01-B1*05:01L HLA-DRB4*02:01NL HLA-DRB1*04:10L HLA-DRB1*09:01L
AFASEAARVVR

SEQ ID NO: 20759 - protein, 13 aa, Severe acute respiratory syndrome coronavirus 2
  REGION 1..13: note = Table B: HLA-DPA1*01:03-B1*03:01L
NSVRVLQKAAITI

SEQ ID NO: 20760 - protein, 13 aa, Severe acute respiratory syndrome coronavirus 2
  REGION 1..13: note = Table B: HLA-DPA1*01:03-B1*03:01L
LRLIDAMMFTSDL

SEQ ID NO: 20761 - protein, 13 aa, Severe acute respiratory syndrome coronavirus 2
  REGION 1..13: note = Table B: HLA-DPA1*01:03-B1*03:01L HLA-DRB1*14:17L
AYITGGVVQLTSQ

SEQ ID NO: 20762 - protein, 14 aa, Severe acute respiratory syndrome coronavirus 2
  REGION 1..14: note = Table B: HLA-DPA1*01:03-B1*03:01L HLA-DRB1*14:02L HLA-DRB1*09:01L HLA-DRB1*12:02L
TGGVVQLTSQWLTN

SEQ ID NO: 20763 - protein, 17 aa, Severe acute respiratory syndrome coronavirus 2
  REGION 1..17: note = Table B: HLA-DPA1*01:03-B1*03:01L
EKLKPVLDWLEEKFKEG

SEQ ID NO: 20764 - protein, 16 aa, Severe acute respiratory syndrome coronavirus 2
  REGION 1..16: note = Table B: HLA-DPA1*01:03-B1*03:01L
TFFKLVNKFLALCADS

SEQ ID NO: 20765 - protein, 13 aa, Severe acute respiratory syndrome coronavirus 2
  REGION 1..13: note = Table B: HLA-DPA1*01:03-B1*03:01L HLA-DPA1*02:01-B1*13:01L HLA-DRB1*15:03L
LVNKFLALCADSI

SEQ ID NO: 20766 - protein, 15 aa, Severe acute respiratory syndrome coronavirus 2
  REGION 1..15: note = Table B: HLA-DPA1*01:03-B1*03:01L HLA-DPA1*02:01-B1*13:01L
IIGGAKLKALNLGET

SEQ ID NO: 20767 - protein, 13 aa, Severe acute respiratory syndrome coronavirus 2
  REGION 1..13: note = Table B: HLA-DPA1*01:03-B1*03:01L HLA-DPA1*03:01-B1*04:02L HLA-DQA1*01-B1*05L HLA-DPA1*01:03-B1*04:02L
IIFLEGETLPTEV

SEQ ID NO: 20768 - protein, 14 aa, Severe acute respiratory syndrome coronavirus 2
  REGION 1..14: note = Table B: HLA-DPA1*01:03-B1*03:01L
EVLTEEVVLKTGDL

SEQ ID NO: 20769 - protein, 16 aa, Severe acute respiratory syndrome coronavirus 2
  REGION 1..16: note = Table B: HLA-DPA1*01:03-B1*03:01L HLA-DPA1*03:01-B1*105:01L
QPTSEAVEAPLVGTPV

SEQ ID NO: 20770 - protein, 16 aa, Severe acute respiratory syndrome coronavirus 2
  REGION 1..16: note = Table B: HLA-DPA1*01:03-B1*03:01L
MMVTNNTFTLKGGAPT

SEQ ID NO: 20771 - protein, 13 aa, Severe acute respiratory syndrome coronavirus 2
  REGION 1..13: note = Table B: HLA-DPA1*01:03-B1*03:01L HLA-DQA1*05:01-B1*02:01L HLA-DQA1*05:05-B1*03:116L HLA-DPA1*01:03-B1*04:02L HLA-DRB1*04:08L HLA-DRB1*15:03L
TFTLKGGAPTKVT

SEQ ID NO: 20772 - protein, 12 aa, Severe acute respiratory syndrome coronavirus 2
  REGION 1..12: note = Table B: HLA-DPA1*01:03-B1*03:01L
TFELDERIDKVL

SEQ ID NO: 20773 - protein, 14 aa, Severe acute respiratory syndrome coronavirus 2
  REGION 1..14: note = Table B: HLA-DPA1*01:03-B1*03:01L
VIKTLQPVSELLTP

SEQ ID NO: 20774 - protein, 10 aa, Severe acute respiratory syndrome coronavirus 2
  REGION 1..10: note = Table B: HLA-DPA1*01:03-B1*03:01L HLA-DRB1*03:01L HLA-DRB1*11:02L HLA-DQA1*01-B1*05L HLA-DQA1*05:05-B1*03:19M HLA-DQA1*05:01-B1*02:01L HLA-DPA1*01:03-B1*104:01L HLA-DRB1*16:01L
LDEWSMATYY

SEQ ID NO: 20775 - protein, 12 aa, Severe acute respiratory syndrome coronavirus 2
  REGION 1..12: note = Table B: HLA-DPA1*01:03-B1*03:01L HLA-DQA1*01:01-B1*05:01L HLA-DRB1*08:01L HLA-DRB1*12:01L HLA-DRB1*04:08L
EDDYQGKPLEFG

SEQ ID NO: 20776 - protein, 13 aa, Severe acute respiratory syndrome coronavirus 2
  REGION 1..13: note = Table B: HLA-DPA1*01:03-B1*03:01L
EDNQTTTIQTIVE

SEQ ID NO: 20777 - protein, 13 aa, Severe acute respiratory syndrome coronavirus 2
  REGION 1..13: note = Table B: HLA-DPA1*01:03-B1*03:01L HLA-DRB1*12:01L
LEMELTPVVQTIE

SEQ ID NO: 20778 - protein, 14 aa, Severe acute respiratory syndrome coronavirus 2
  REGION 1..14: note = Table B: HLA-DPA1*01:03-B1*03:01L HLA-DPA1*03:01-B1*04:02L HLA-DPA1*02:01-B1*13:01L
YLKLTDNVYIKNAD

SEQ ID NO: 20779 - protein, 18 aa, Severe acute respiratory syndrome coronavirus 2
  REGION 1..18: note = Table B: HLA-DPA1*01:03-B1*03:01L
IKNADIVEEAKKVKPTVV

SEQ ID NO: 20780 - protein, 14 aa, Severe acute respiratory syndrome coronavirus 2
  REGION 1..14: note = Table B: HLA-DPA1*01:03-B1*03:01L HLA-DRB1*14:02L
NVYLKHGGGVAGAL

SEQ ID NO: 20781 - protein, 12 aa, Severe acute respiratory syndrome coronavirus 2
  REGION 1..12: note = Table B: HLA-DPA1*01:03-B1*03:01L HLA-DPA1*03:01-B1*04:02L
LYDKLVSSFLEM

SEQ ID NO: 20782 - protein, 16 aa, Severe acute respiratory syndrome coronavirus 2
  REGION 1..16: note = Table B: HLA-DPA1*01:03-B1*03:01L
DKKIKACVEEVTTTLE

SEQ ID NO: 20783 - protein, 17 aa, Severe acute respiratory syndrome coronavirus 2
  REGION 1..17: note = Table B: HLA-DPA1*01:03-B1*03:01L
GTTEMLAKALRKVPTDN

SEQ ID NO: 20784 - protein, 12 aa, Severe acute respiratory syndrome coronavirus 2
  REGION 1..12: note = Table B: HLA-DPA1*01:03-B1*03:01L HLA-DPA1*03:01-B1*04:02L HLA-DRB1*15:03L
NEKQEILGTVSW

SEQ ID NO: 20785 - protein, 12 aa, Severe acute respiratory syndrome coronavirus 2
  REGION 1..12: note = Table B: HLA-DPA1*01:03-B1*03:01L HLA-DQA1*01-B1*05L HLA-DRB1*04:10L HLA-DPA1*02:01-B1*13:01L
QEILGTVSWNLR

SEQ ID NO: 20786 - protein, 12 aa, Severe acute respiratory syndrome coronavirus 2
  REGION 1..12: note = Table B: HLA-DPA1*01:03-B1*03:01L HLA-DQA1*01-B1*05L
EILGTVSWNLRE

SEQ ID NO: 20787 - protein, 18 aa, Severe acute respiratory syndrome coronavirus 2
  REGION 1..18: note = Table B: HLA-DPA1*01:03-B1*03:01L HLA-DRB1*14:02L HLA-DQA1*05:01-B1*02:01L
NLREMLAHAEETRKLMPV

SEQ ID NO: 20788 - protein, 13 aa, Severe acute respiratory syndrome coronavirus 2
  REGION 1..13: note = Table B: HLA-DPA1*01:03-B1*03:01L
SKTTVASLINTLN

SEQ ID NO: 20789 - protein, 15 aa, Severe acute respiratory syndrome coronavirus 2
  REGION 1..15: note = Table B: HLA-DPA1*01:03-B1*03:01L HLA-DRB1*10:01L
KTTVASLINTLNDLN

SEQ ID NO: 20790 - protein, 14 aa, Severe acute respiratory syndrome coronavirus 2
  REGION 1..14: note = Table B: HLA-DPA1*01:03-B1*03:01L HLA-DQA1*05:05-B1*03:01L
LINTLNDLNETLVT

SEQ ID NO: 20791 - protein, 14 aa, Severe acute respiratory syndrome coronavirus 2
  REGION 1..14: note = Table B: HLA-DPA1*01:03-B1*03:01L HLA-DRB1*12:01L
RSLKVPATVSVSSP

SEQ ID NO: 20792 - protein, 10 aa, Severe acute respiratory syndrome coronavirus 2
  REGION 1..10: note = Table B: HLA-DPA1*01:03-B1*03:01L HLA-DQA1*05:05-B1*03:19L HLA-DQA1*05:01-B1*02:01L HLA-DPA1*01:03-B1*104:01L HLA-DRB1*16:01L
LAGSYKDWSY

SEQ ID NO: 20793 - protein, 13 aa, Severe acute respiratory syndrome coronavirus 2
  REGION 1..13: note = Table B: HLA-DPA1*01:03-B1*03:01L HLA-DRB1*08:01L HLA-DPA1*02:01-B1*13:01L HLA-DQA1*01:03-B1*06:01L HLA-DRB1*04:08L
SYKDWSYSGQSTQ

SEQ ID NO: 20794 - protein, 13 aa, Severe acute respiratory syndrome coronavirus 2
  REGION 1..13: note = Table B: HLA-DPA1*01:03-B1*03:01L HLA-DRB1*12:01L
WSYSGQSTQLGIE

SEQ ID NO: 20795 - protein, 18 aa, Severe acute respiratory syndrome coronavirus 2
  REGION 1..18: note = Table B: HLA-DPA1*01:03-B1*03:01L HLA-DPA1*01:03-B1*104:01L
SGQSTQLGIEFLKRGDKS

SEQ ID NO: 20796 - protein, 18 aa, Severe acute respiratory syndrome coronavirus 2
  REGION 1..18: note = Table B: HLA-DPA1*01:03-B1*03:01L
TFDNLKTLLSLREVRTIK

SEQ ID NO: 20797 - protein, 16 aa, Severe acute respiratory syndrome coronavirus 2
  REGION 1..16: note = Table B: HLA-DPA1*01:03-B1*03:01L HLA-DRB1*11:03L HLA-DRB1*14:02L HLA-DPA1*01:03-B1*104:01L HLA-DPA1*01:02-B1*04:01L HLA-DRB1*08:03L
DGADVTKIKPHNSHEG

SEQ ID NO: 20798 - protein, 18 aa, Severe acute respiratory syndrome coronavirus 2
  REGION 1..18: note = Table B: HLA-DPA1*01:03-B1*03:01L
GADVTKIKPHNSHEGKTF

SEQ ID NO: 20799 - protein, 10 aa, Severe acute respiratory syndrome coronavirus 2
  REGION 1..10: note = Table B: HLA-DPA1*01:03-B1*03:01L HLA-DQA1*01-B1*05L HLA-DQA1*05:05-B1*03:19L HLA-DQA1*05:01-B1*02:01L HLA-DRB1*10:01L HLA-DRB1*16:01L
NDDTLRVEAF

SEQ ID NO: 20800 - protein, 12 aa, Severe acute respiratory syndrome coronavirus 2
  REGION 1..12: note = Table B: HLA-DPA1*01:03-B1*03:01L HLA-DRB1*10:01L HLA-DRB1*04:08L
YYHTTDPSFLGR

SEQ ID NO: 20801 - protein, 18 aa, Severe acute respiratory syndrome coronavirus 2
  REGION 1..18: note = Table B: HLA-DPA1*01:03-B1*03:01L HLA-DRB1*11:02L HLA-DRB1*14:02L
LGRYMSALNHTKKWKYPQ

SEQ ID NO: 20802 - protein, 14 aa, Severe acute respiratory syndrome coronavirus 2
  REGION 1..14: note = Table B: HLA-DPA1*01:03-B1*03:01L HLA-DPA1*01:03-B1*104:01L HLA-DRB1*15:03L
HTKKWKYPQVNGLT

SEQ ID NO: 20803 - protein, 12 aa, Severe acute respiratory syndrome coronavirus 2
  REGION 1..12: note = Table B: HLA-DPA1*01:03-B1*03:01L HLA-DQA1*05:05-B1*03:19L HLA-DPA1*01:03-B1*04:01L HLA-DRB1*12:01L HLA-DRB1*15:03L
NGLTSIKWADNN

SEQ ID NO: 20804 - protein, 16 aa, Severe acute respiratory syndrome coronavirus 2
  REGION 1..16: note = Table B: HLA-DPA1*01:03-B1*03:01L HLA-DRB1*14:02L
SYLFQHANLDSCKRVL

SEQ ID NO: 20805 - protein, 16 aa, Severe acute respiratory syndrome coronavirus 2
  REGION 1..16: note = Table B: HLA-DPA1*01:03-B1*03:01L
EQFKKGVQIPCTCGKQ

SEQ ID NO: 20806 - protein, 14 aa, Severe acute respiratory syndrome coronavirus 2
  REGION 1..14: note = Table B: HLA-DPA1*01:03-B1*03:01L HLA-DPA1*02:01-B1*13:01L HLA-DPA1*03:01-B1*105:01L HLA-DQA1*05:05-B1*03:01L HLA-DQA1*01:03-B1*06:01L
YELKHGTFTCASEY

SEQ ID NO: 20807 - protein, 14 aa, Severe acute respiratory syndrome coronavirus 2
  REGION 1..14: note = Table B: HLA-DPA1*01:03-B1*03:01L HLA-DPA1*02:01-B1*13:01L HLA-DQA1*05:05-B1*03:01L HLA-DQA1*01:03-B1*06:01L HLA-DQA1*02:01-B1*03:03L
ELKHGTFTCASEYT

SEQ ID NO: 20808 - protein, 15 aa, Severe acute respiratory syndrome coronavirus 2
  REGION 1..15: note = Table B: HLA-DPA1*01:03-B1*03:01L HLA-DRB1*03:01L HLA-DPA1*01:03-B1*04:02L
ETLYCIDGALLTKSS

SEQ ID NO: 20809 - protein, 16 aa, Severe acute respiratory syndrome coronavirus 2
  REGION 1..16: note = Table B: HLA-DPA1*01:03-B1*03:01L HLA-DRB1*04:08L
VTYKLDGVVCTEIDPK

SEQ ID NO: 20810 - protein, 17 aa, Severe acute respiratory syndrome coronavirus 2
  REGION 1..17: note = Table B: HLA-DPA1*01:03-B1*03:01L HLA-DPA1*03:01-B1*105:01L
DPKLDNYYKKDNSYFTE

SEQ ID NO: 20811 - protein, 15 aa, Severe acute respiratory syndrome coronavirus 2
  REGION 1..15: note = Table B: HLA-DPA1*01:03-B1*03:01L HLA-DPA1*03:01-B1*04:02L HLA-DRB1*03:01L HLA-DRB1*11:04L HLA-DRB1*14:02L HLA-DRB1*11:01L HLA-DQA1*01-B1*05L HLA-DQA1*05:01-B1*02:01L HLA-DPA1*01:03-B1*04:02L HLA-DPA1*01:02-B1*04:01L
DNYYKKDNSYFTEQP

SEQ ID NO: 20812 - protein, 10 aa, Severe acute respiratory syndrome coronavirus 2
  REGION 1..10: note = Table B: HLA-DPA1*01:03-B1*03:01L HLA-DQA1*05:05-B1*03:19L HLA-DQA1*05:01-B1*02:01L HLA-DPA1*01:03-B1*104:01L HLA-DRB1*16:01L
PIDLVPNQPY

SEQ ID NO: 20813 - protein, 16 aa, Severe acute respiratory syndrome coronavirus 2
  REGION 1..16: note = Table B: HLA-DPA1*01:03-B1*03:01L HLA-DPA1*03:01-B1*04:02L HLA-DRB1*14:02L HLA-DQA1*05:01-B1*02:01L HLA-DPA1*01:03-B1*04:02L HLA-DQA1*01:03-B1*06:01L
NFKFVCDNIKFADDLN

SEQ ID NO: 20814 - protein, 16 aa, Severe acute respiratory syndrome coronavirus 2
  REGION 1..16: note = Table B: HLA-DPA1*01:03-B1*03:01L HLA-DPA1*01:03-B1*104:01L
DLNQLTGYKKPASREL

SEQ ID NO: 20815 - protein, 18 aa, Severe acute respiratory syndrome coronavirus 2
  REGION 1..18: note = Table B: HLA-DPA1*01:03-B1*03:01L HLA-DPA1*03:01-B1*105:01L HLA-DPA1*01:03-B1*104:01L
GAKLLHKPIVWHVNNATN

SEQ ID NO: 20816 - protein, 13 aa, Severe acute respiratory syndrome coronavirus 2
  REGION 1..13: note = Table B: HLA-DPA1*01:03-B1*03:01L HLA-DQA1*05:01-B1*02:01L HLA-DPA1*03:01-B1*105:01L HLA-DRB1*15:03L
NATNKATYKPNTW

SEQ ID NO: 20817 - protein, 16 aa, Severe acute respiratory syndrome coronavirus 2
  REGION 1..16: note = Table B: HLA-DPA1*01:03-B1*03:01L
NPTIQKDVLECNVKTT

SEQ ID NO: 20818 - protein, 17 aa, Severe acute respiratory syndrome coronavirus 2
  REGION 1..17: note = Table B: HLA-DPA1*01:03-B1*03:01L HLA-DPA1*02:01-B1*13:01L
IQKDVLECNVKTTEVVG

SEQ ID NO: 20819 - protein, 18 aa, Severe acute respiratory syndrome coronavirus 2
  REGION 1..18: note = Table B: HLA-DPA1*01:03-B1*03:01L HLA-DPA1*01:03-B1*104:01L
KPNELSRVLGLKTLATHG

SEQ ID NO: 20820 - protein, 13 aa, Severe acute respiratory syndrome coronavirus 2
  REGION 1..13: note = Table B: HLA-DPA1*01:03-B1*03:01L HLA-DRB1*04:08L
LKTLATHGLAAVN

SEQ ID NO: 20821 - protein, 15 aa, Severe acute respiratory syndrome coronavirus 2
  REGION 1..15: note = Table B: HLA-DPA1*01:03-B1*03:01L HLA-DPA1*02:01-B1*13:01L
IVTRCLNRVCTNYMP

SEQ ID NO: 20822 - protein, 12 aa, Severe acute respiratory syndrome coronavirus 2
  REGION 1..12: note = Table B: HLA-DPA1*01:03-B1*03:01L HLA-DPA1*02:01-B1*13:01L
LNRVCTNYMPYF

SEQ ID NO: 20823 - protein, 13 aa, Severe acute respiratory syndrome coronavirus 2
  REGION 1..13: note = Table B: HLA-DPA1*01:03-B1*03:01L
IKASMPTTIAKNT

SEQ ID NO: 20824 - protein, 16 aa, Severe acute respiratory syndrome coronavirus 2
  REGION 1..16: note = Table B: HLA-DPA1*01:03-B1*03:01L HLA-DPA1*01:03-B1*104:01L
NTVKSVGKFCLEASFN

SEQ ID NO: 20825 - protein, 13 aa, Severe acute respiratory syndrome coronavirus 2
  REGION 1..13: note = Table B: HLA-DPA1*01:03-B1*03:01L HLA-DPA1*03:01-B1*04:02L HLA-DPA1*02:01-B1*13:01L HLA-DPA1*03:01-B1*105:01L HLA-DPA1*01:03-B1*104:01L
SVGKFCLEASFNY

SEQ ID NO: 20826 - protein, 11 aa, Severe acute respiratory syndrome coronavirus 2
  REGION 1..11: note = Table B: HLA-DPA1*01:03-B1*03:01L
LAYILFTRFFY

SEQ ID NO: 20827 - protein, 12 aa, Severe acute respiratory syndrome coronavirus 2
  REGION 1..12: note = Table B: HLA-DPA1*01:03-B1*03:01L HLA-DPA1*02:01-B1*13:01L
FFSYFAVHFISN

SEQ ID NO: 20828 - protein, 12 aa, Severe acute respiratory syndrome coronavirus 2
  REGION 1..12: note = Table B: HLA-DPA1*01:03-B1*03:01L HLA-DPA1*01:03-B1*04:02L
AVHFISNSWLMW

SEQ ID NO: 20829 - protein, 13 aa, Severe acute respiratory syndrome coronavirus 2
  REGION 1..13: note = Table B: HLA-DPA1*01:03-B1*03:01L
FYYVWKSYVHVVD

SEQ ID NO: 20830 - protein, 16 aa, Severe acute respiratory syndrome coronavirus 2
  REGION 1..16: note = Table B: HLA-DPA1*01:03-B1*03:01L
VWKSYVHVVDGCNSST

SEQ ID NO: 20831 - protein, 18 aa, Severe acute respiratory syndrome coronavirus 2
  REGION 1..18: note = Table B: HLA-DPA1*01:03-B1*03:01L HLA-DPA1*03:01-B1*04:02L HLA-DQA1*05:05-B1*03:116L HLA-DPA1*01:03-B1*02:01L HLA-DPA1*01:03-B1*104:01L HLA-DPA1*01:02-B1*04:01L
VARDLSLQFKRPINPTDQ

SEQ ID NO: 20832 - protein, 14 aa, Severe acute respiratory syndrome coronavirus 2
  REGION 1..14: note = Table B: HLA-DPA1*01:03-B1*03:01L HLA-DPA1*02:01-B1*13:01L
ANNTKGSLPINVIV

SEQ ID NO: 20833 - protein, 14 aa, Severe acute respiratory syndrome coronavirus 2
  REGION 1..14: note = Table B: HLA-DPA1*01:03-B1*03:01L
NTKGSLPINVIVFD

SEQ ID NO: 20834 - protein, 14 aa, Severe acute respiratory syndrome coronavirus 2
  REGION 1..14: note = Table B: HLA-DPA1*01:03-B1*03:01L
ELAKNVSLDNVLST

SEQ ID NO: 20835 - protein, 16 aa, Severe acute respiratory syndrome coronavirus 2
  REGION 1..16: note = Table B: HLA-DPA1*01:03-B1*03:01L HLA-DPA1*03:01-B1*04:02L HLA-DRB1*11:02L HLA-DRB1*14:02L HLA-DQA1*05:05-B1*03:19L HLA-DPA1*01:03-B1*04:02L HLA-DPA1*01:03-B1*104:01L HLA-DRB1*08:02L
KDVVECLKLSHQSDIE

SEQ ID NO: 20836 - protein, 14 aa, Severe acute respiratory syndrome coronavirus 2
  REGION 1..14: note = Table B: HLA-DPA1*01:03-B1*03:01L HLA-DPA1*03:01-B1*04:02L HLA-DRB1*14:02L HLA-DQA1*05:05-B1*03:19L HLA-DPA1*01:03-B1*04:02L HLA-DPA1*01:03-B1*02:01L
MLTYNKVENMTPRD

SEQ ID NO: 20837 - protein, 17 aa, Severe acute respiratory syndrome coronavirus 2
  REGION 1..17: note = Table B: HLA-DPA1*01:03-B1*03:01L
TPRDLGACIDCSARHIN

SEQ ID NO: 20838 - protein, 15 aa, Severe acute respiratory syndrome coronavirus 2
  REGION 1..15: note = Table B: HLA-DPA1*01:03-B1*03:01L
ARHINAQVAKSHNIA

SEQ ID NO: 20839 - protein, 15 aa, Severe acute respiratory syndrome coronavirus 2
  REGION 1..15: note = Table B: HLA-DPA1*01:03-B1*03:01L HLA-DQA1*05:05-B1*03:19L
NVKDFMSLSEQLRKQ

SEQ ID NO: 20840 - protein, 12 aa, Severe acute respiratory syndrome coronavirus 2
  REGION 1..12: note = Table B: HLA-DPA1*01:03-B1*03:01L HLA-DPA1*03:01-B1*04:02L HLA-DQA1*05:01-B1*02:01L HLA-DPA1*01:03-B1*04:02L
IALKGGKIVNNW

SEQ ID NO: 20841 - protein, 15 aa, Severe acute respiratory syndrome coronavirus 2
  REGION 1..15: note = Table B: HLA-DPA1*01:03-B1*03:01L HLA-DRB1*03:01L HLA-DRB1*11:02L
GKIVNNWLKQLIKVT

SEQ ID NO: 20842 - protein, 15 aa, Severe acute respiratory syndrome coronavirus 2
  REGION 1..15: note = Table B: HLA-DPA1*01:03-B1*03:01L HLA-DRB1*03:01L HLA-DRB1*13:01L HLA-DQA1*03:01-B1*03:02L HLA-DRB1*14:54L HLA-DPA1*01:03-B1*104:01L HLA-DRB1*07:01L
GDFLHFLPRVFSAVG

SEQ ID NO: 20843 - protein, 15 aa, Severe acute respiratory syndrome coronavirus 2
  REGION 1..15: note = Table B: HLA-DPA1*01:03-B1*03:01L
DFLHFLPRVFSAVGN

SEQ ID NO: 20844 - protein, 13 aa, Severe acute respiratory syndrome coronavirus 2
  REGION 1..13: note = Table B: HLA-DPA1*01:03-B1*03:01L HLA-DRB1*12:01L HLA-DRB1*15:03L
TNVLEGSVAYESL

SEQ ID NO: 20845 - protein, 13 aa, Severe acute respiratory syndrome coronavirus 2
  REGION 1..13: note = Table B: HLA-DPA1*01:03-B1*03:01L HLA-DQA1*05:01-B1*02:01L
ESLRPDTRYVLMD

SEQ ID NO: 20846 - protein, 13 aa, Severe acute respiratory syndrome coronavirus 2
  REGION 1..13: note = Table B: HLA-DPA1*01:03-B1*03:01L
FPNTYLEGSVRVV

SEQ ID NO: 20847 - protein, 16 aa, Severe acute respiratory syndrome coronavirus 2
  REGION 1..16: note = Table B: HLA-DPA1*01:03-B1*03:01L
ERSEAGVCVSTSGRWV

SEQ ID NO: 20848 - protein, 12 aa, Severe acute respiratory syndrome coronavirus 2
  REGION 1..12: note = Table B: HLA-DPA1*01:03-B1*03:01L
GVDAVNLLTNMF

SEQ ID NO: 20849 - protein, 16 aa, Severe acute respiratory syndrome coronavirus 2
  REGION 1..16: note = Table B: HLA-DPA1*01:03-B1*03:01L HLA-DRB1*14:01L HLA-DQA1*05:05-B1*03:19L HLA-DPA1*03:01-B1*105:01L HLA-DRB1*15:03L
QPIGALDISASIVAGG

SEQ ID NO: 20850 - protein, 16 aa, Severe acute respiratory syndrome coronavirus 2
  REGION 1..16: note = Table B: HLA-DPA1*01:03-B1*03:01L HLA-DPA1*01:03-B1*104:01L
RFRRAFGEYSHVVAFN

SEQ ID NO: 20851 - protein, 16 aa, Severe acute respiratory syndrome coronavirus 2
  REGION 1..16: note = Table B: HLA-DPA1*01:03-B1*03:01L HLA-DQA1*05:05-B1*03:19L HLA-DRB1*04:08L
SFTVLCLTPVYSFLPG

SEQ ID NO: 20852 - protein, 15 aa, Severe acute respiratory syndrome coronavirus 2
  REGION 1..15: note = Table B: HLA-DPA1*01:03-B1*03:01L
AHIQWMVMFTPLVPF

SEQ ID NO: 20853 - protein, 14 aa, Severe acute respiratory syndrome coronavirus 2
  REGION 1..14: note = Table B: HLA-DPA1*01:03-B1*03:01L HLA-DPA1*01:03-B1*04:02L HLA-DPA1*03:01-B1*105:01L HLA-DPA1*01:03-B1*104:01L
ISTKHFYWFFSNYL

SEQ ID NO: 20854 - protein, 15 aa, Severe acute respiratory syndrome coronavirus 2
  REGION 1..15: note = Table B: HLA-DPA1*01:03-B1*03:01L
AKALNDFSNSGSDVL

SEQ ID NO: 20855 - protein, 15 aa, Severe acute respiratory syndrome coronavirus 2
  REGION 1..15: note = Table B: HLA-DPA1*01:03-B1*03:01L HLA-DPA1*01:03-B1*104:01L HLA-DRB1*07:01L
SGFRKMAFPSGKVEG

SEQ ID NO: 20856 - protein, 13 aa, Severe acute respiratory syndrome coronavirus 2
  REGION 1..13: note = Table B: HLA-DPA1*01:03-B1*03:01L HLA-DQA1*05:05-B1*03:19L HLA-DPA1*01:03-B1*04:01L HLA-DPA1*01:03-B1*04:02L HLA-DQA1*05:05-B1*03:01L
SEDMLNPNYEDLL

SEQ ID NO: 20857 - protein, 14 aa, Severe acute respiratory syndrome coronavirus 2
  REGION 1..14: note = Table B: HLA-DPA1*01:03-B1*03:01L HLA-DPA1*01:03-B1*04:02L
EDMLNPNYEDLLIR

SEQ ID NO: 20858 - protein, 15 aa, Severe acute respiratory syndrome coronavirus 2
  REGION 1..15: note = Table B: HLA-DPA1*01:03-B1*03:01L HLA-DRB1*03:01L HLA-DRB1*11:02L HLA-DRB1*11:03L HLA-DRB1*14:02L HLA-DRB1*11:01L
EDLLIRKSNHNFLVQ

SEQ ID NO: 20859 - protein, 15 aa, Severe acute respiratory syndrome coronavirus 2
  REGION 1..15: note = Table B: HLA-DPA1*01:03-B1*03:01L
LLIRKSNHNFLVQAG

SEQ ID NO: 20860 - protein, 12 aa, Severe acute respiratory syndrome coronavirus 2
  REGION 1..12: note = Table B: HLA-DPA1*01:03-B1*03:01L
NFLVQAGNVQLR

SEQ ID NO: 20861 - protein, 14 aa, Severe acute respiratory syndrome coronavirus 2
  REGION 1..14: note = Table B: HLA-DPA1*01:03-B1*03:01L
FLVQAGNVQLRVIG

SEQ ID NO: 20862 - protein, 13 aa, Severe acute respiratory syndrome coronavirus 2
  REGION 1..13: note = Table B: HLA-DPA1*01:03-B1*03:01L HLA-DRB1*14:02L HLA-DRB1*04:08L
LKLKVDTANPKTP

SEQ ID NO: 20863 - protein, 11 aa, Severe acute respiratory syndrome coronavirus 2
  REGION 1..11: note = Table B: HLA-DPA1*01:03-B1*03:01L HLA-DQA1*01-B1*05L HLA-DRB1*12:01L HLA-DQA1*05:05-B1*03:01L
RIQPGQTFSVL

SEQ ID NO: 20864 - protein, 14 aa, Severe acute respiratory syndrome coronavirus 2
  REGION 1..14: note = Table B: HLA-DPA1*01:03-B1*03:01L HLA-DPA1*02:01-B1*13:01L
QPGQTFSVLACYNG

SEQ ID NO: 20865 - protein, 14 aa, Severe acute respiratory syndrome coronavirus 2
  REGION 1..14: note = Table B: HLA-DPA1*01:03-B1*03:01L HLA-DPA1*03:01-B1*04:02L HLA-DRB1*14:01L HLA-DPA1*02:01-B1*13:01L HLA-DRB1*15:03L
SPSGVYQCAMRPNF

SEQ ID NO: 20866 - protein, 14 aa, Severe acute respiratory syndrome coronavirus 2
  REGION 1..14: note = Table B: HLA-DPA1*01:03-B1*03:01L
LVAMKYNYEPLTQD

SEQ ID NO: 20867 - protein, 14 aa, Severe acute respiratory syndrome coronavirus 2
  REGION 1..14: note = Table B: HLA-DPA1*01:03-B1*03:01L HLA-DPA1*03:01-B1*105:01L
ILGPLSAQTGIAVL

SEQ ID NO: 20868 - protein, 16 aa, Severe acute respiratory syndrome coronavirus 2
  REGION 1..16: note = Table B: HLA-DPA1*01:03-B1*03:01L HLA-DRB1*03:01L HLA-DQA1*05:01-B1*02:01L HLA-DRB1*16:01L HLA-DRB1*04:08L
LKELLQNGMNGRTILG

SEQ ID NO: 20869 - protein, 16 aa, Severe acute respiratory syndrome coronavirus 2
  REGION 1..16: note = Table B: HLA-DPA1*01:03-B1*03:01L HLA-DPA1*01:03-B1*04:02L
MSAFAMMFVKHKHAFL

SEQ ID NO: 20870 - protein, 14 aa, Severe acute respiratory syndrome coronavirus 2
  REGION 1..14: note = Table B: HLA-DPA1*01:03-B1*03:01L HLA-DQA1*05:05-B1*03:19L HLA-DQA1*05:05-B1*03:01L HLA-DQA1*02:01-B1*03:03L
FKLKDCVMYASAVV

SEQ ID NO: 20871 - protein, 13 aa, Severe acute respiratory syndrome coronavirus 2
  REGION 1..13: note = Table B: HLA-DPA1*01:03-B1*03:01L
DGARRVWTLMNVL

SEQ ID NO: 20872 - protein, 12 aa, Severe acute respiratory syndrome coronavirus 2
  REGION 1..12: note = Table B: HLA-DPA1*01:03-B1*03:01L HLA-DPA1*03:01-B1*04:02L HLA-DRB1*12:01L HLA-DPA1*03:01-B1*105:01L HLA-DRB1*15:03L
RYFRLTLGVYDY

SEQ ID NO: 20873 - protein, 15 aa, Severe acute respiratory syndrome coronavirus 2
  REGION 1..15: note = Table B: HLA-DPA1*01:03-B1*03:01L HLA-DPA1*01:03-B1*04:02L HLA-DPA1*02:01-B1*13:01L
QEFRYMNSQGLLPPK

SEQ ID NO: 20874 - protein, 15 aa, Severe acute respiratory syndrome coronavirus 2
  REGION 1..15: note = Table B: HLA-DPA1*01:03-B1*03:01L HLA-DPA1*02:01-B1*13:01L HLA-DPA1*01:03-B1*104:01L
YMNSQGLLPPKNSID

SEQ ID NO: 20875 - protein, 13 aa, Severe acute respiratory syndrome coronavirus 2
  REGION 1..13: note = Table B: HLA-DPA1*01:03-B1*03:01L HLA-DRB1*11:04L HLA-DQA1*05:05-B1*03:19L HLA-DQA1*05:05-B1*03:01L HLA-DRB1*10:01L
LSVLQQLRVESSS

SEQ ID NO: 20876 - protein, 12 aa, Severe acute respiratory syndrome coronavirus 2
  REGION 1..12: note = Table B: HLA-DPA1*01:03-B1*03:01L HLA-DPA1*03:01-B1*04:02L HLA-DPA1*01:03-B1*04:01L
SEFSSLPSYAAF

SEQ ID NO: 20877 - protein, 13 aa, Severe acute respiratory syndrome coronavirus 2
  REGION 1..13: note = Table B: HLA-DPA1*01:03-B1*03:01L
KLKKSLNVAKSEF

SEQ ID NO: 20878 - protein, 15 aa, Severe acute respiratory syndrome coronavirus 2
  REGION 1..15: note = Table B: HLA-DPA1*01:03-B1*03:01L
AMQRKLEKMADQAMT

SEQ ID NO: 20879 - protein, 14 aa, Severe acute respiratory syndrome coronavirus 2
  REGION 1..14: note = Table B: HLA-DPA1*01:03-B1*03:01L
EDKRAKVTSAMQTM

SEQ ID NO: 20880 - protein, 14 aa, Severe acute respiratory syndrome coronavirus 2
  REGION 1..14: note = Table B: HLA-DPA1*01:03-B1*03:01L
DKRAKVTSAMQTML

SEQ ID NO: 20881 - protein, 17 aa, Severe acute respiratory syndrome coronavirus 2
  REGION 1..17: note = Table B: HLA-DPA1*01:03-B1*03:01L
VTSAMQTMLFTMLRKLD

SEQ ID NO: 20882 - protein, 16 aa, Severe acute respiratory syndrome coronavirus 2
  REGION 1..16: note = Table B: HLA-DPA1*01:03-B1*03:01L HLA-DQA1*01-B1*05L
SAMQTMLFTMLRKLDN

SEQ ID NO: 20883 - protein, 16 aa, Severe acute respiratory syndrome coronavirus 2
  REGION 1..16: note = Table B: HLA-DPA1*01:03-B1*03:01L
MQTMLFTMLRKLDNDA

SEQ ID NO: 20884 - protein, 14 aa, Severe acute respiratory syndrome coronavirus 2
  REGION 1..14: note = Table B: HLA-DPA1*01:03-B1*03:01L HLA-DPA1*02:01-B1*13:01L
NNARDGCVPLNIIP

SEQ ID NO: 20885 - protein, 14 aa, Severe acute respiratory syndrome coronavirus 2
  REGION 1..14: note = Table B: HLA-DPA1*01:03-B1*03:01L HLA-DPA1*02:01-B1*13:01L HLA-DPA1*01:03-B1*104:01L HLA-DQA1*01:03-B1*06:01L
NARDGCVPLNIIPL

SEQ ID NO: 20886 - protein, 13 aa, Severe acute respiratory syndrome coronavirus 2
  REGION 1..13: note = Table B: HLA-DPA1*01:03-B1*03:01L HLA-DRB1*12:01L HLA-DRB1*15:03L
TTAAKLMVVIPDY

SEQ ID NO: 20887 - protein, 15 aa, Severe acute respiratory syndrome coronavirus 2
  REGION 1..15: note = Table B: HLA-DPA1*01:03-B1*03:01L
ASALWEIQQVVDADS

SEQ ID NO: 20888 - protein, 12 aa, Severe acute respiratory syndrome coronavirus 2
  REGION 1..12: note = Table B: HLA-DPA1*01:03-B1*03:01L HLA-DQA1*05:05-B1*03:19L HLA-DRB1*09:01L HLA-DRB1*07:01L HLA-DRB1*04:08L
KIVQLSEISMDN

SEQ ID NO: 20889 - protein, 13 aa, Severe acute respiratory syndrome coronavirus 2
  REGION 1..13: note = Table B: HLA-DPA1*01:03-B1*03:01L HLA-DQA1*05:01-B1*02:01L HLA-DPA1*03:01-B1*105:01L
DNSPNLAWPLIVT

SEQ ID NO: 20890 - protein, 14 aa, Severe acute respiratory syndrome coronavirus 2
  REGION 1..14: note = Table B: HLA-DPA1*01:03-B1*03:01L
AWPLIVTALRANSA

SEQ ID NO: 20891 - protein, 13 aa, Severe acute respiratory syndrome coronavirus 2
  REGION 1..13: note = Table B: HLA-DPA1*01:03-B1*03:01L HLA-DPA1*03:01-B1*04:02L HLA-DRB1*11:04L HLA-DRB1*11:01L HLA-DQA1*05:05-B1*03:19L HLA-DQA1*05:01-B1*02:01L HLA-DRB1*09:01L HLA-DPA1*03:01-B1*105:01L HLA-DPA1*01:02-B1*04:01L
VTALRANSAVKLQ

SEQ ID NO: 20892 - protein, 12 aa, Severe acute respiratory syndrome coronavirus 2
  REGION 1..12: note = Table B: HLA-DPA1*01:03-B1*03:01L HLA-DRB1*12:02L
AVKLQNNELSPV

SEQ ID NO: 20893 - protein, 10 aa, Severe acute respiratory syndrome coronavirus 2
  REGION 1..10: note = Table B: HLA-DPA1*01:03-B1*03:01L HLA-DRB1*11:02L HLA-DQA1*05:05-B1*03:19M HLA-DQA1*05:01-B1*02:01L HLA-DPA1*01:03-B1*104:01L HLA-DRB1*16:01L
CTDDNALAYY

SEQ ID NO: 20894 - protein, 15 aa, Severe acute respiratory syndrome coronavirus 2
  REGION 1..15: note = Table B: HLA-DPA1*01:03-B1*03:01L HLA-DRB4*01:01L HLA-DRB3*01:01L HLA-DPA1*01:03-B1*02:01L HLA-DPA1*01:03-B1*104:01L HLA-DQA1*05:05-B1*03:01L
GRFVLALLSDLQDLK

SEQ ID NO: 20895 - protein, 10 aa, Severe acute respiratory syndrome coronavirus 2
  REGION 1..10: note = Table B: HLA-DPA1*01:03-B1*03:01L HLA-DQA1*01-B1*05L HLA-DQA1*05:05-B1*03:19L HLA-DQA1*05:01-B1*02:01L HLA-DPA1*01:03-B1*104:01L HLA-DRB1*16:01L
YTELEPPCRF

SEQ ID NO: 20896 - protein, 14 aa, Severe acute respiratory syndrome coronavirus 2
  REGION 1..14: note = Table B: HLA-DPA1*01:03-B1*03:01L
LAATVRLQAGNATE

SEQ ID NO: 20897 - protein, 15 aa, Severe acute respiratory syndrome coronavirus 2
  REGION 1..15: note = Table B: HLA-DPA1*01:03-B1*03:01L
LQAGNATEVPANSTV

SEQ ID NO: 20898 - protein, 14 aa, Severe acute respiratory syndrome coronavirus 2
  REGION 1..14: note = Table B: HLA-DPA1*01:03-B1*03:01L HLA-DRB1*12:01L
TVLSFCAFAVDAAK

SEQ ID NO: 20899 - protein, 14 aa, Severe acute respiratory syndrome coronavirus 2
  REGION 1..14: note = Table B: HLA-DPA1*01:03-B1*03:01L HLA-DRB1*08:01L HLA-DRB1*11:01L HLA-DPA1*01:03-B1*04:02L HLA-DRB1*12:01L
THTGTGQAITVTPE

SEQ ID NO: 20900 - protein, 14 aa, Severe acute respiratory syndrome coronavirus 2
  REGION 1..14: note = Table B: HLA-DPA1*01:03-B1*03:01L
TVTPEANMDQESFG

SEQ ID NO: 20901 - protein, 14 aa, Severe acute respiratory syndrome coronavirus 2
  REGION 1..14: note = Table B: HLA-DPA1*01:03-B1*03:01L
VTPEANMDQESFGG

SEQ ID NO: 20902 - protein, 14 aa, Severe acute respiratory syndrome coronavirus 2
  REGION 1..14: note = Table B: HLA-DPA1*01:03-B1*03:01L
VVYRAFDIYNDKVA

SEQ ID NO: 20903 - protein, 15 aa, Severe acute respiratory syndrome coronavirus 2
  REGION 1..15: note = Table B: HLA-DPA1*01:03-B1*03:01L HLA-DRB1*11:03L HLA-DRB1*13:01L HLA-DRB1*07:01L HLA-DRB1*08:03L HLA-DRB1*15:01L
DDNLIDSYFVVKRHT

SEQ ID NO: 20904 - protein, 15 aa, Severe acute respiratory syndrome coronavirus 2
  REGION 1..15: note = Table B: HLA-DPA1*01:03-B1*03:01L
DNLIDSYFVVKRHTF

SEQ ID NO: 20905 - protein, 15 aa, Severe acute respiratory syndrome coronavirus 2
  REGION 1..15: note = Table B: HLA-DPA1*01:03-B1*03:01L HLA-DPA1*01:03-B1*02:01L
DSYFVVKRHTFSNYQ

SEQ ID NO: 20906 - protein, 16 aa, Severe acute respiratory syndrome coronavirus 2
  REGION 1..16: note = Table B: HLA-DPA1*01:03-B1*03:01L HLA-DPA1*03:01-B1*04:02L HLA-DRB1*11:01L HLA-DPA1*01:03-B1*04:02L HLA-DPA1*01:03-B1*02:01L
YFVVKRHTFSNYQHEE

SEQ ID NO: 20907 - protein, 15 aa, Severe acute respiratory syndrome coronavirus 2
  REGION 1..15: note = Table B: HLA-DPA1*01:03-B1*03:01L
IYNLLKDCPAVAKHD

SEQ ID NO: 20908 - protein, 14 aa, Severe acute respiratory syndrome coronavirus 2
  REGION 1..14: note = Table B: HLA-DPA1*01:03-B1*03:01L
NLLKDCPAVAKHDF

SEQ ID NO: 20909 - protein, 15 aa, Severe acute respiratory syndrome coronavirus 2
  REGION 1..15: note = Table B: HLA-DPA1*01:03-B1*03:01L
SRQRLTKYTMADLVY

SEQ ID NO: 20910 - protein, 10 aa, Severe acute respiratory syndrome coronavirus 2
  REGION 1..10: note = Table B: HLA-DPA1*01:03-B1*03:01L HLA-DQA1*05:05-B1*03:19L HLA-DQA1*05:01-B1*02:01L HLA-DPA1*01:03-B1*104:01L HLA-DRB1*16:01L
DDYFNKKDWY

SEQ ID NO: 20911 - protein, 15 aa, Severe acute respiratory syndrome coronavirus 2
  REGION 1..15: note = Table B: HLA-DPA1*01:03-B1*03:01L
QALLKTVQFCDAMRN

SEQ ID NO: 20912 - protein, 13 aa, Severe acute respiratory syndrome coronavirus 2
  REGION 1..13: note = Table B: HLA-DPA1*01:03-B1*03:01L HLA-DRB1*04:08L
DAMRNAGIVGVLT

SEQ ID NO: 20913 - protein, 11 aa, Severe acute respiratory syndrome coronavirus 2
  REGION 1..11: note = Table B: HLA-DPA1*01:03-B1*03:01L HLA-DPA1*01:03-B1*104:01L HLA-DRB1*16:01L
LDNQDLNGNWY

SEQ ID NO: 20914 - protein, 13 aa, Severe acute respiratory syndrome coronavirus 2
  REGION 1..13: note = Table B: HLA-DPA1*01:03-B1*03:01L HLA-DRB1*11:04L HLA-DRB1*14:02L HLA-DRB1*09:01L HLA-DRB1*12:02L HLA-DPA1*01:02-B1*04:01L HLA-DRB1*10:01L HLA-DRB1*04:08L
GDFIQTTPGSGVP

SEQ ID NO: 20915 - protein, 14 aa, Severe acute respiratory syndrome coronavirus 2
  REGION 1..14: note = Table B: HLA-DPA1*01:03-B1*03:01L
DFIQTTPGSGVPVV

SEQ ID NO: 20916 - protein, 15 aa, Severe acute respiratory syndrome coronavirus 2
  REGION 1..15: note = Table B: HLA-DPA1*01:03-B1*03:01L HLA-DQA1*05:01-B1*02:01L HLA-DPA1*01:03-B1*04:02L HLA-DQA1*05:05-B1*03:01L HLA-DPA1*01:02-B1*04:01L
VPVVDSYYSLLMPIL

SEQ ID NO: 20917 - protein, 16 aa, Severe acute respiratory syndrome coronavirus 2
  REGION 1..16: note = Table B: HLA-DPA1*01:03-B1*03:01L HLA-DRB1*11:02L HLA-DRB1*11:03L HLA-DRB1*11:04L HLA-DRB1*08:02L HLA-DRB1*08:03L
EERLKLFDRYFKYWDQ

SEQ ID NO: 20918 - protein, 16 aa, Severe acute respiratory syndrome coronavirus 2
  REGION 1..16: note = Table B: HLA-DPA1*01:03-B1*03:01L HLA-DRB1*11:02L HLA-DQA1*05:05-B1*03:19L
ERLKLFDRYFKYWDQT

SEQ ID NO: 20919 - protein, 14 aa, Severe acute respiratory syndrome coronavirus 2
  REGION 1..14: note = Table B: HLA-DPA1*01:03-B1*03:01L
FNVLFSTVFPPTSF

SEQ ID NO: 20920 - protein, 16 aa, Severe acute respiratory syndrome coronavirus 2
  REGION 1..16: note = Table B: HLA-DPA1*01:03-B1*03:01L HLA-DPA1*02:01-B1*13:01L
KRTTCFSVAALTNNVA

SEQ ID NO: 20921 - protein, 15 aa, Severe acute respiratory syndrome coronavirus 2
  REGION 1..15: note = Table B: HLA-DPA1*01:03-B1*03:01L HLA-DRB1*11:03L HLA-DRB1*11:04L HLA-DRB1*14:02L
AALTNNVAFQTVKPG

SEQ ID NO: 20922 - protein, 12 aa, Severe acute respiratory syndrome coronavirus 2
  REGION 1..12: note = Table B: HLA-DPA1*01:03-B1*03:01L HLA-DQA1*05:05-B1*03:19L HLA-DQA1*05:01-B1*02:01L HLA-DPA1*01:03-B1*104:01L
TVKPGNFNKDFY

SEQ ID NO: 20923 - protein, 11 aa, Severe acute respiratory syndrome coronavirus 2
  REGION 1..11: note = Table B: HLA-DPA1*01:03-B1*03:01L HLA-DQA1*05:05-B1*03:01L
FYDFAVSKGFF

SEQ ID NO: 20924 - protein, 18 aa, Severe acute respiratory syndrome coronavirus 2
  REGION 1..18: note = Table B: HLA-DPA1*01:03-B1*03:01L
VSKGFFKEGSSVELKHFF

SEQ ID NO: 20925 - protein, 15 aa, Severe acute respiratory syndrome coronavirus 2
  REGION 1..15: note = Table B: HLA-DPA1*01:03-B1*03:01L HLA-DQA1*01:01-B1*05:01L
VELKHFFFAQDGNAA

SEQ ID NO: 20926 - protein, 11 aa, Severe acute respiratory syndrome coronavirus 2
  REGION 1..11: note = Table B: HLA-DPA1*01:03-B1*03:01L HLA-DRB1*16:01L
DGNAAISDYDY

SEQ ID NO: 20927 - protein, 14 aa, Severe acute respiratory syndrome coronavirus 2
  REGION 1..14: note = Table B: HLA-DPA1*01:03-B1*03:01L HLA-DPA1*03:01-B1*04:02L HLA-DQA1*05:01-B1*02:01L HLA-DPA1*01:03-B1*104:01L HLA-DPA1*01:02-B1*04:01L HLA-DQA1*02:01-B1*03:03L
DIRQLLFVVEVVDK

SEQ ID NO: 20928 - protein, 15 aa, Severe acute respiratory syndrome coronavirus 2
  REGION 1..15: note = Table B: HLA-DPA1*01:03-B1*03:01L HLA-DRB1*11:02L HLA-DRB1*14:02L HLA-DPA1*01:03-B1*04:02L HLA-DPA1*02:01-B1*13:01L HLA-DRB1*08:02L HLA-DRB1*08:03L
FPFNKWGKARLYYDS

SEQ ID NO: 20929 - protein, 16 aa, Severe acute respiratory syndrome coronavirus 2
  REGION 1..16: note = Table B: HLA-DPA1*01:03-B1*03:01L HLA-DPA1*03:01-B1*105:01L
LKYAISAKNRARTVAG

SEQ ID NO: 20930 - protein, 15 aa, Severe acute respiratory syndrome coronavirus 2
  REGION 1..15: note = Table B: HLA-DPA1*01:03-B1*03:01L
RARTVAGVSICSTMT

SEQ ID NO: 20931 - protein, 16 aa, Severe acute respiratory syndrome coronavirus 2
  REGION 1..16: note = Table B: HLA-DPA1*01:03-B1*03:01L
LARKHTTCCSLSHRFY

SEQ ID NO: 20932 - protein, 14 aa, Severe acute respiratory syndrome coronavirus 2
  REGION 1..14: note = Table B: HLA-DPA1*01:03-B1*03:01L HLA-DRB1*14:02L
DFVNEFYAYLRKHF

SEQ ID NO: 20933 - protein, 14 aa, Severe acute respiratory syndrome coronavirus 2
  REGION 1..14: note = Table B: HLA-DPA1*01:03-B1*03:01L HLA-DRB1*11:02L
FVNEFYAYLRKHFS

SEQ ID NO: 20934 - protein, 11 aa, Severe acute respiratory syndrome coronavirus 2
  REGION 1..11: note = Table B: HLA-DPA1*01:03-B1*03:01L HLA-DQA1*01:01-B1*05:01L HLA-DRB1*11:01L HLA-DRB4*01:01L HLA-DPA1*01:03-B1*04:02L
VYLPYPDPSRI

SEQ ID NO: 20935 - protein, 12 aa, Severe acute respiratory syndrome coronavirus 2
  REGION 1..12: note = Table B: HLA-DPA1*01:03-B1*03:01L HLA-DPA1*03:01-B1*04:02L HLA-DQA1*01-B1*05L HLA-DPA1*03:01-B1*105:01L HLA-DRB1*15:03L
ERFVSLAIDAYP

SEQ ID NO: 20936 - protein, 16 aa, Severe acute respiratory syndrome coronavirus 2
  REGION 1..16: note = Table B: HLA-DPA1*01:03-B1*03:01L HLA-DRB1*14:02L HLA-DPA1*01:03-B1*04:01L HLA-DPA1*01:03-B1*104:01L HLA-DQA1*05:05-B1*03:01L HLA-DRB1*07:01L
DVFHLYLQYIRKLHDE

SEQ ID NO: 20937 - protein, 12 aa, Severe acute respiratory syndrome coronavirus 2
  REGION 1..12: note = Table B: HLA-DPA1*01:03-B1*03:01L
FYEAMYTPHTVL

SEQ ID NO: 20938 - protein, 12 aa, Severe acute respiratory syndrome coronavirus 2
  REGION 1..12: note = Table B: HLA-DPA1*01:03-B1*03:01L HLA-DRB1*04:10L
YEAMYTPHTVLQ

SEQ ID NO: 20939 - protein, 15 aa, Severe acute respiratory syndrome coronavirus 2
  REGION 1..15: note = Table B: HLA-DPA1*01:03-B1*03:01L HLA-DPA1*03:01-B1*04:02L HLA-DRB1*03:01L HLA-DRB1*11:02L HLA-DRB1*14:02L HLA-DQA1*05:05-B1*03:19L HLA-DRB1*13:01L HLA-DPA1*03:01-B1*105:01L HLA-DQA1*05:05-B1*03:01L
  REGION 1..15: note = CONT. FROM ABOVE: HLA-DQA1*01:03-B1*06:01L HLA-DRB1*08:02L
DHVISTSHKLVLSVN

SEQ ID NO: 20940 - protein, 12 aa, Severe acute respiratory syndrome coronavirus 2
  REGION 1..12: note = Table B: HLA-DPA1*01:03-B1*03:01L HLA-DQA1*01-B1*05L HLA-DQA1*05:05-B1*03:19L
VTDVTQLYLGGM

SEQ ID NO: 20941 - protein, 13 aa, Severe acute respiratory syndrome coronavirus 2
  REGION 1..13: note = Table B: HLA-DPA1*01:03-B1*03:01L HLA-DQA1*05:05-B1*03:19L HLA-DRB1*12:02L HLA-DRB1*08:02L
FGLYKNTCVGSDN

SEQ ID NO: 20942 - protein, 16 aa, Severe acute respiratory syndrome coronavirus 2
  REGION 1..16: note = Table B: HLA-DPA1*01:03-B1*03:01L HLA-DPA1*02:01-B1*13:01L
DNVTDFNAIATCDWTN

SEQ ID NO: 20943 - protein, 16 aa, Severe acute respiratory syndrome coronavirus 2
  REGION 1..16: note = Table B: HLA-DPA1*01:03-B1*03:01L HLA-DRB1*15:03L
DFNAIATCDWTNAGDY

SEQ ID NO: 20944 - protein, 13 aa, Severe acute respiratory syndrome coronavirus 2
  REGION 1..13: note = Table B: HLA-DPA1*01:03-B1*03:01L HLA-DRB1*14:17L
SYGIATVREVLSD

SEQ ID NO: 20945 - protein, 10 aa, Severe acute respiratory syndrome coronavirus 2
  REGION 1..10: note = Table B: HLA-DPA1*01:03-B1*03:01L HLA-DRB1*03:01L HLA-DQA1*05:05-B1*03:19M HLA-DQA1*05:01-B1*02:01L HLA-DPA1*01:03-B1*104:01L HLA-DRB1*16:01L
LSDRELHLSW

SEQ ID NO: 20946 - protein, 18 aa, Severe acute respiratory syndrome coronavirus 2
  REGION 1..18: note = Table B: HLA-DPA1*01:03-B1*03:01L
RPPLNRNYVFTGYRVTKN

SEQ ID NO: 20947 - protein, 19 aa, Severe acute respiratory syndrome coronavirus 2
  REGION 1..19: note = Table B: HLA-DPA1*01:03-B1*03:01L HLA-DRB1*14:02L HLA-DPA1*01:03-B1*104:01L
PPLNRNYVFTGYRVTKNSK

SEQ ID NO: 20948 - protein, 14 aa, Severe acute respiratory syndrome coronavirus 2
  REGION 1..14: note = Table B: HLA-DPA1*01:03-B1*03:01L
GYRVTKNSKVQIGE

SEQ ID NO: 20949 - protein, 10 aa, Severe acute respiratory syndrome coronavirus 2
  REGION 1..10: note = Table B: HLA-DPA1*01:03-B1*03:01L HLA-DQA1*01-B1*05L HLA-DQA1*05:05-B1*03:19L HLA-DQA1*05:01-B1*02:01L HLA-DPA1*01:03-B1*104:01L HLA-DRB1*16:01L
KGDYGDAVVY

SEQ ID NO: 20950 - protein, 14 aa, Severe acute respiratory syndrome coronavirus 2
  REGION 1..14: note = Table B: HLA-DPA1*01:03-B1*03:01L HLA-DQA1*05:05-B1*03:19L HLA-DRB1*16:01L
FVLTSHTVMPLSAP

SEQ ID NO: 20951 - protein, 14 aa, Severe acute respiratory syndrome coronavirus 2
  REGION 1..14: note = Table B: HLA-DPA1*01:03-B1*03:01L HLA-DRB1*04:10L HLA-DPA1*02:01-B1*13:01L HLA-DRB1*04:08L
VMPLSAPTLVPQEH

SEQ ID NO: 20952 - protein, 11 aa, Severe acute respiratory syndrome coronavirus 2
  REGION 1..11: note = Table B: HLA-DPA1*01:03-B1*03:01L HLA-DQA1*01:01-B1*05:01L HLA-DRB1*13:01L HLA-DRB1*04:10L HLA-DRB1*07:01L HLA-DRB1*15:03L
EFSSNVANYQK

SEQ ID NO: 20953 - protein, 14 aa, Severe acute respiratory syndrome coronavirus 2
  REGION 1..14: note = Table B: HLA-DPA1*01:03-B1*03:01L HLA-DQA1*05:05-B1*03:19L HLA-DPA1*02:01-B1*13:01L HLA-DQA1*05:05-B1*03:01L HLA-DRB1*15:03L
VGMQKYSTLQGPPG

SEQ ID NO: 20954 - protein, 18 aa, Severe acute respiratory syndrome coronavirus 2
  REGION 1..18: note = Table B: HLA-DPA1*01:03-B1*03:01L
AAVDALCEKALKYLPIDK

SEQ ID NO: 20955 - protein, 16 aa, Severe acute respiratory syndrome coronavirus 2
  REGION 1..16: note = Table B: HLA-DPA1*01:03-B1*03:01L HLA-DPA1*03:01-B1*04:02L HLA-DRB1*03:01L HLA-DRB1*11:02L HLA-DRB1*14:02L HLA-DPA1*01:03-B1*04:02L
ALKYLPIDKCSRIIPA

SEQ ID NO: 20956 - protein, 13 aa, Severe acute respiratory syndrome coronavirus 2
  REGION 1..13: note = Table B: HLA-DPA1*01:03-B1*03:01L HLA-DRB1*12:01L HLA-DPA1*03:01-B1*105:01L HLA-DRB1*14:17L HLA-DRB1*15:03L
TVNALPETTADIV

SEQ ID NO: 20957 - protein, 17 aa, Severe acute respiratory syndrome coronavirus 2
  REGION 1..17: note = Table B: HLA-DPA1*01:03-B1*03:01L HLA-DQA1*01:03-B1*06:01L
VNARLRAKHYVYIGDPA

SEQ ID NO: 20958 - protein, 13 aa, Severe acute respiratory syndrome coronavirus 2
  REGION 1..13: note = Table B: HLA-DPA1*01:03-B1*03:01L HLA-DRB1*08:01L HLA-DPA1*02:01-B1*13:01L
EYDYVIFTQTTET

SEQ ID NO: 20959 - protein, 13 aa, Severe acute respiratory syndrome coronavirus 2
  REGION 1..13: note = Table B: HLA-DPA1*01:03-B1*03:01L
ITRAKVGILCIMS

SEQ ID NO: 20960 - protein, 11 aa, Severe acute respiratory syndrome coronavirus 2
  REGION 1..11: note = Table B: HLA-DPA1*01:03-B1*03:01L HLA-DRB1*14:01L HLA-DPA1*01:03-B1*04:01L HLA-DPA1*01:03-B1*04:02L
DLYDKLQFTSL

SEQ ID NO: 20961 - protein, 12 aa, Severe acute respiratory syndrome coronavirus 2
  REGION 1..12: note = Table B: HLA-DPA1*01:03-B1*03:01L
ATLQAENVTGLF

SEQ ID NO: 20962 - protein, 16 aa, Severe acute respiratory syndrome coronavirus 2
  REGION 1..16: note = Table B: HLA-DPA1*01:03-B1*03:01L HLA-DPA1*03:01-B1*04:02L HLA-DRB1*11:02L HLA-DRB1*14:02L HLA-DQA1*01-B1*05L HLA-DQA1*05:05-B1*03:19L HLA-DRB4*01:01L HLA-DPA1*01:03-B1*04:02L HLA-DPA1*01:03-B1*104:01L
  REGION 1..16: note = CONT. FROM ABOVE: HLA-DQA1*05:05-B1*03:01L HLA-DQA1*01:03-B1*06: 01L HLA-DRB1*08:02L
DMTYRRLISMMGFKMN

SEQ ID NO: 20963 - protein, 17 aa, Severe acute respiratory syndrome coronavirus 2
  REGION 1..17: note = Table B: HLA-DPA1*01:03-B1*03:01L HLA-DQA1*05:05-B1*03:19L HLA-DQA1*05:01-B1*02:01L
TPNNTDFSRVSAKPPPG

SEQ ID NO: 20964 - protein, 12 aa, Severe acute respiratory syndrome coronavirus 2
  REGION 1..12: note = Table B: HLA-DPA1*01:03-B1*03:01L HLA-DPA1*01:03-B1*04:01L
IVQMLSDTLKNL

SEQ ID NO: 20965 - protein, 13 aa, Severe acute respiratory syndrome coronavirus 2
  REGION 1..13: note = Table B: HLA-DPA1*01:03-B1*03:01L HLA-DRB1*12:01L HLA-DRB1*04:08L
GFDYVYNPFMIDV

SEQ ID NO: 20966 - protein, 14 aa, Severe acute respiratory syndrome coronavirus 2
  REGION 1..14: note = Table B: HLA-DPA1*01:03-B1*03:01L HLA-DPA1*01:03-B1*04:02L
PFMIDVQQWGFTGN

SEQ ID NO: 20967 - protein, 13 aa, Severe acute respiratory syndrome coronavirus 2
  REGION 1..13: note = Table B: HLA-DPA1*01:03-B1*03:01L
WTIEYPIIGDELK

SEQ ID NO: 20968 - protein, 12 aa, Severe acute respiratory syndrome coronavirus 2
  REGION 1..12: note = Table B: HLA-DPA1*01:03-B1*03:01L HLA-DQA1*05:01-B1*02:01L HLA-DQA1*05:05-B1*03:01L HLA-DQA1*01:03-B1*06:01L HLA-DRB1*15:03L
FYDAQPCSDKAY

SEQ ID NO: 20969 - protein, 15 aa, Severe acute respiratory syndrome coronavirus 2
  REGION 1..15: note = Table B: HLA-DPA1*01:03-B1*03:01L HLA-DRB1*13:01L HLA-DPA1*01:03-B1*104:01L HLA-DRB1*10:01L HLA-DQA1*01:03-B1*06:01L
GGSLYVNKHAFHTPA

SEQ ID NO: 20970 - protein, 14 aa, Severe acute respiratory syndrome coronavirus 2
  REGION 1..14: note = Table B: HLA-DPA1*01:03-B1*03:01L HLA-DPA1*03:01-B1*04:02L HLA-DRB1*14:01L HLA-DRB1*08:01L HLA-DPA1*01:03-B1*04:02L HLA-DPA1*02:01-B1*13:01L HLA-DQA1*05:05-B1*03:01L
PFFYYSDSPCESHG

SEQ ID NO: 20971 - protein, 11 aa, Severe acute respiratory syndrome coronavirus 2
  REGION 1..11: note = Table B: HLA-DPA1*01:03-B1*03:01L HLA-DRB1*14:02L HLA-DPA1*02:01-B1*13:01L HLA-DQA1*02:01-B1*03:03L
SLWVYKQFDTY

SEQ ID NO: 20972 - protein, 14 aa, Severe acute respiratory syndrome coronavirus 2
  REGION 1..14: note = Table B: HLA-DPA1*01:03-B1*03:01L
VYKQFDTYNLWNTF

SEQ ID NO: 20973 - protein, 13 aa, Severe acute respiratory syndrome coronavirus 2
  REGION 1..13: note = Table B: HLA-DPA1*01:03-B1*03:01L HLA-DPA1*01:03-B1*04:01L HLA-DPA1*01:03-B1*04:02L HLA-DRB1*12:01L HLA-DRB1*04:08L HLA-DRB1*15:03L
VDGVDVELFENKT

SEQ ID NO: 20974 - protein, 14 aa, Severe acute respiratory syndrome coronavirus 2
  REGION 1..14: note = Table B: HLA-DPA1*01:03-B1*03:01L HLA-DPA1*02:01-B1*13:01L HLA-DQA1*05:05-B1*03:01L
IKPVPEVKILNNLG

SEQ ID NO: 20975 - protein, 13 aa, Severe acute respiratory syndrome coronavirus 2
  REGION 1..13: note = Table B: HLA-DPA1*01:03-B1*03:01L HLA-DPA1*02:01-B1*13:01L HLA-DPA1*03:01-B1*105:01L
YKRDAPAHISTIG

SEQ ID NO: 20976 - protein, 15 aa, Severe acute respiratory syndrome coronavirus 2
  REGION 1..15: note = Table B: HLA-DPA1*01:03-B1*03:01L HLA-DRB1*03:01L HLA-DRB1*14:02L HLA-DRB4*01:01L HLA-DPA1*01:03-B1*04:02L HLA-DRB3*01:01L
APLTVFFDGRVDGQV

SEQ ID NO: 20977 - protein, 14 aa, Severe acute respiratory syndrome coronavirus 2
  REGION 1..14: note = Table B: HLA-DPA1*01:03-B1*03:01L
GQVDLFRNARNGVL

SEQ ID NO: 20978 - protein, 14 aa, Severe acute respiratory syndrome coronavirus 2
  REGION 1..14: note = Table B: HLA-DPA1*01:03-B1*03:01L HLA-DQA1*01:01-B1*05:01L HLA-DRB1*08:01L HLA-DRB1*11:01L HLA-DPA1*02:01-B1*13:01L
GSVKGLQPSVGPKQ

SEQ ID NO: 20979 - protein, 13 aa, Severe acute respiratory syndrome coronavirus 2
  REGION 1..13: note = Table B: HLA-DPA1*01:03-B1*03:01L HLA-DRB1*12:01L HLA-DRB1*16:01L
VGPKQASLNGVTL

SEQ ID NO: 20980 - protein, 10 aa, Severe acute respiratory syndrome coronavirus 2
  REGION 1..10: note = Table B: HLA-DPA1*01:03-B1*03:01L HLA-DRB1*03:01L HLA-DRB1*11:02L HLA-DQA1*05:05-B1*03:19M HLA-DQA1*05:01-B1*02:01L HLA-DPA1*01:03-B1*104:01L HLA-DRB1*16:01L
FIERYKLEGY

SEQ ID NO: 20981 - protein, 18 aa, Severe acute respiratory syndrome coronavirus 2
  REGION 1..18: note = Table B: HLA-DPA1*01:03-B1*03:01L HLA-DRB1*14:02L HLA-DQA1*05:05-B1*03:19L HLA-DPA1*03:01-B1*105:01L
GGLHLLIGLAKRFKESPF

SEQ ID NO: 20982 - protein, 18 aa, Severe acute respiratory syndrome coronavirus 2
  REGION 1..18: note = Table B: HLA-DPA1*01:03-B1*03:01L HLA-DRB1*03:01L HLA-DQA1*05:05-B1*03:116L HLA-DPA1*01:03-B1*104:01L HLA-DQA1*05:05-B1*03:01L
GLHLLIGLAKRFKESPFE

SEQ ID NO: 20983 - protein, 14 aa, Severe acute respiratory syndrome coronavirus 2
  REGION 1..14: note = Table B: HLA-DPA1*01:03-B1*03:01L
GLAKRFKESPFELE

SEQ ID NO: 20984 - protein, 16 aa, Severe acute respiratory syndrome coronavirus 2
  REGION 1..16: note = Table B: HLA-DPA1*01:03-B1*03:01L HLA-DPA1*01:03-B1*104:01L
YTEISFMLWCKDGHVE

SEQ ID NO: 20985 - protein, 11 aa, Severe acute respiratory syndrome coronavirus 2
  REGION 1..11: note = Table B: HLA-DPA1*01:03-B1*03:01L HLA-DRB1*14:02L HLA-DPA1*01:03-B1*104:01L HLA-DRB1*16:01L HLA-DRB1*15:03L
WQPGVAMPNLY

SEQ ID NO: 20986 - protein, 11 aa, Severe acute respiratory syndrome coronavirus 2
  REGION 1..11: note = Table B: HLA-DPA1*01:03-B1*03:01L HLA-DQA1*05:01-B1*02:01L HLA-DQA1*01:03-B1*06:01L HLA-DQA1*02:01-B1*03:03L
NVAKYTQLCQY

SEQ ID NO: 20987 - protein, 13 aa, Severe acute respiratory syndrome coronavirus 2
  REGION 1..13: note = Table B: HLA-DPA1*01:03-B1*03:01L HLA-DQA1*01:03-B1*06:01L
GAGSDKGVAPGTA

SEQ ID NO: 20988 - protein, 15 aa, Severe acute respiratory syndrome coronavirus 2
  REGION 1..15: note = Table B: HLA-DPA1*01:03-B1*03:01L HLA-DRB1*15:03L
AGSDKGVAPGTAVLR

SEQ ID NO: 20989 - protein, 19 aa, Severe acute respiratory syndrome coronavirus 2
  REGION 1..19: note = Table B: HLA-DPA1*01:03-B1*03:01L HLA-DPA1*01:03-B1*04:02L
PTGTLLVDSDLNDFVSDAD

SEQ ID NO: 20990 - protein, 16 aa, Severe acute respiratory syndrome coronavirus 2
  REGION 1..16: note = Table B: HLA-DPA1*01:03-B1*03:01L HLA-DRB1*11:02L HLA-DRB1*14:02L HLA-DQA1*05:05-B1*03:19L HLA-DPA1*01:03-B1*04:01L HLA-DPA1*02:01-B1*13:01L
EAFLIGCNYLGKPREQ

SEQ ID NO: 20991 - protein, 13 aa, Severe acute respiratory syndrome coronavirus 2
  REGION 1..13: note = Table B: HLA-DPA1*01:03-B1*03:01L
NPIQLSSYSLFDM

SEQ ID NO: 20992 - protein, 16 aa, Severe acute respiratory syndrome coronavirus 2
  REGION 1..16: note = Table B: HLA-DPA1*01:03-B1*03:01L
AVMSLKEGQINDMILS

SEQ ID NO: 20993 - protein, 16 aa, Severe acute respiratory syndrome coronavirus 2
  REGION 1..16: note = Table B: HLA-DPA1*01:03-B1*03:01L HLA-DRB1*14:02L HLA-DQA1*05:05-B1*03:19L HLA-DPA1*03:01-B1*105:01L
ILSLLSKGRLIIRENN

SEQ ID NO: 20994 - protein, 14 aa, Severe acute respiratory syndrome coronavirus 2
  REGION 1..14: note = Table B: HLA-DPA1*01:03-B1*03:01L
TRTQLPPAYTNSFT

SEQ ID NO: 20995 - protein, 15 aa, Severe acute respiratory syndrome coronavirus 2
  REGION 1..15: note = Table B: HLA-DPA1*01:03-B1*03:01L HLA-DPA1*02:01-B1*13:01L HLA-DQA1*05:05-B1*03:01L
NVVIKVCEFQFCNDP

SEQ ID NO: 20996 - protein, 10 aa, Severe acute respiratory syndrome coronavirus 2
  REGION 1..10: note = Table B: HLA-DPA1*01:03-B1*03:01L HLA-DQA1*05:05-B1*03:19M HLA-DQA1*05:01-B1*02:01L HLA-DPA1*01:03-B1*104:01L
CNDPFLGVYY

SEQ ID NO: 20997 - protein, 16 aa, Severe acute respiratory syndrome coronavirus 2
  REGION 1..16: note = Table B: HLA-DPA1*01:03-B1*03:01L HLA-DRB1*13:01L HLA-DPA1*01:03-B1*104:01L HLA-DQA1*05:05-B1*03:01L
LGVYYHKNNKSWMESE

SEQ ID NO: 20998 - protein, 16 aa, Severe acute respiratory syndrome coronavirus 2
  REGION 1..16: note = Table B: HLA-DPA1*01:03-B1*03:01L
GVYYHKNNKSWMESEF

SEQ ID NO: 20999 - protein, 16 aa, Severe acute respiratory syndrome coronavirus 2
  REGION 1..16: note = Table B: HLA-DPA1*01:03-B1*03:01L HLA-DRB1*03:01L
VYYHKNNKSWMESEFR

SEQ ID NO: 21000 - protein, 12 aa, Severe acute respiratory syndrome coronavirus 2
  REGION 1..12: note = Table B: HLA-DPA1*01:03-B1*03:01L HLA-DRB1*12:01L
FRVYSSANNCTF

SEQ ID NO: 21001 - protein, 12 aa, Severe acute respiratory syndrome coronavirus 2
  REGION 1..12: note = Table B: HLA-DPA1*01:03-B1*03:01L HLA-DRB1*14:02L HLA-DRB1*12:01L HLA-DPA1*03:01-B1*105:01L HLA-DPA1*01:03-B1*104:01L HLA-DQA1*05:05-B1*03:01L HLA-DQA1*02:01-B1*03:03L
VYSSANNCTFEY

SEQ ID NO: 21002 - protein, 18 aa, Severe acute respiratory syndrome coronavirus 2
  REGION 1..18: note = Table B: HLA-DPA1*01:03-B1*03:01L HLA-DRB1*11:02L HLA-DQA1*05:05-B1*03:19L HLA-DPA1*01:03-B1*04:02L HLA-DQA1*05:05-B1*03:01L
GKQGNFKNLREFVFKNID

SEQ ID NO: 21003 - protein, 18 aa, Severe acute respiratory syndrome coronavirus 2
  REGION 1..18: note = Table B: HLA-DPA1*01:03-B1*03:01L HLA-DPA1*01:03-B1*04:02L
KQGNFKNLREFVFKNIDG

SEQ ID NO: 21004 - protein, 18 aa, Severe acute respiratory syndrome coronavirus 2
  REGION 1..18: note = Table B: HLA-DPA1*01:03-B1*03:01L HLA-DQA1*05:05-B1*03:01L
FKIYSKHTPINLVRDLPQ

SEQ ID NO: 21005 - protein, 11 aa, Severe acute respiratory syndrome coronavirus 2
  REGION 1..11: note = Table B: HLA-DPA1*01:03-B1*03:01L
NLVRDLPQGFS

SEQ ID NO: 21006 - protein, 12 aa, Severe acute respiratory syndrome coronavirus 2
  REGION 1..12: note = Table B: HLA-DPA1*01:03-B1*03:01L HLA-DPA1*01:03-B1*104:01L
WTAGAAAYYVGY

SEQ ID NO: 21007 - protein, 11 aa, Severe acute respiratory syndrome coronavirus 2
  REGION 1..11: note = Table B: HLA-DPA1*01:03-B1*03:01L HLA-DRB1*14:02L HLA-DQA1*01-B1*05L HLA-DRB4*01:01L HLA-DPA1*01:03-B1*04:01L HLA-DPA1*01:03-B1*04:02L HLA-DPA1*02:01-B1*13:01L HLA-DPA1*01:03-B1*104:01L HLA-DRB1*16:01L
  REGION 1..11: note = CONT. FROM ABOVE: HLA-DQA1*01:03-B1*06:01L
YLQPRTFLLKY

SEQ ID NO: 21008 - protein, 18 aa, Severe acute respiratory syndrome coronavirus 2
  REGION 1..18: note = Table B: HLA-DPA1*01:03-B1*03:01L
DPLSETKCTLKSFTVEKG

SEQ ID NO: 21009 - protein, 13 aa, Severe acute respiratory syndrome coronavirus 2
  REGION 1..13: note = Table B: HLA-DPA1*01:03-B1*03:01L HLA-DPA1*02:01-B1*13:01L
SPTKLNDLCFTNV

SEQ ID NO: 21010 - protein, 12 aa, Severe acute respiratory syndrome coronavirus 2
  REGION 1..12: note = Table B: HLA-DPA1*01:03-B1*03:01L HLA-DPA1*03:01-B1*04:02L HLA-DRB1*14:01L HLA-DPA1*01:03-B1*04:01L HLA-DRB1*12:01L HLA-DPA1*01:03-B1*104:01L HLA-DPA1*01:02-B1*04:01L HLA-DRB1*16:01L HLA-DRB1*04:08L
IAPGQTGKIADY

SEQ ID NO: 21011 - protein, 13 aa, Severe acute respiratory syndrome coronavirus 2
  REGION 1..13: note = Table B: HLA-DPA1*01:03-B1*03:01L HLA-DRB1*14:02L HLA-DQA1*05:05-B1*03:19L HLA-DPA1*02:01-B1*13:01L
IAWNSNNLDSKVG

SEQ ID NO: 21012 - protein, 14 aa, Severe acute respiratory syndrome coronavirus 2
  REGION 1..14: note = Table B: HLA-DPA1*01:03-B1*03:01L HLA-DPA1*03:01-B1*04:02L HLA-DRB1*11:01L HLA-DQA1*01-B1*05L HLA-DRB1*07:01L HLA-DRB1*08:03L
ISTEIYQAGSTPCN

SEQ ID NO: 21013 - protein, 14 aa, Severe acute respiratory syndrome coronavirus 2
  REGION 1..14: note = Table B: HLA-DPA1*01:03-B1*03:01L HLA-DPA1*01:03-B1*04:02L HLA-DRB1*12:01L HLA-DRB1*16:01L HLA-DRB1*04:08L
QPYRVVVLSFELLH

SEQ ID NO: 21014 - protein, 14 aa, Severe acute respiratory syndrome coronavirus 2
  REGION 1..14: note = Table B: HLA-DPA1*01:03-B1*03:01L HLA-DRB1*14:02L
VNFNFNGLTGTGVL

SEQ ID NO: 21015 - protein, 13 aa, Severe acute respiratory syndrome coronavirus 2
  REGION 1..13: note = Table B: HLA-DPA1*01:03-B1*03:01L HLA-DRB1*08:01L
GLTGTGVLTESNK

SEQ ID NO: 21016 - protein, 16 aa, Severe acute respiratory syndrome coronavirus 2
  REGION 1..16: note = Table B: HLA-DPA1*01:03-B1*03:01L HLA-DQA1*05:05-B1*03:01L
DAVRDPQTLEILDITP

SEQ ID NO: 21017 - protein, 15 aa, Severe acute respiratory syndrome coronavirus 2
  REGION 1..15: note = Table B: HLA-DPA1*01:03-B1*03:01L HLA-DPA1*02:01-B1*13:01L HLA-DRB1*15:03L
DVNCTEVPVAIHADQ

SEQ ID NO: 21018 - protein, 16 aa, Severe acute respiratory syndrome coronavirus 2
  REGION 1..16: note = Table B: HLA-DPA1*01:03-B1*03:01L HLA-DPA1*02:01-B1*13:01L
GSNVFQTRAGCLIGAE

SEQ ID NO: 21019 - protein, 13 aa, Severe acute respiratory syndrome coronavirus 2
  REGION 1..13: note = Table B: HLA-DPA1*01:03-B1*03:01L HLA-DPA1*01:03-B1*04:02L HLA-DRB1*04:08L
YSNNSIAIPTNFT

SEQ ID NO: 21020 - protein, 13 aa, Severe acute respiratory syndrome coronavirus 2
  REGION 1..13: note = Table B: HLA-DPA1*01:03-B1*03:01L
VTTEILPVSMTKT

SEQ ID NO: 21021 - protein, 15 aa, Severe acute respiratory syndrome coronavirus 2
  REGION 1..15: note = Table B: HLA-DPA1*01:03-B1*03:01L HLA-DPA1*02:01-B1*13:01L
NLLLQYGSFCTQLNR

SEQ ID NO: 21022 - protein, 14 aa, Severe acute respiratory syndrome coronavirus 2
  REGION 1..14: note = Table B: HLA-DPA1*01:03-B1*03:01L HLA-DRB1*11:03L
LTGIAVEQDKNTQE

SEQ ID NO: 21023 - protein, 14 aa, Severe acute respiratory syndrome coronavirus 2
  REGION 1..14: note = Table B: HLA-DPA1*01:03-B1*03:01L HLA-DQA1*05:05-B1*03:01L
IYKTPPIKDFGGFN

SEQ ID NO: 21024 - protein, 12 aa, Severe acute respiratory syndrome coronavirus 2
  REGION 1..12: note = Table B: HLA-DPA1*01:03-B1*03:01L HLA-DRB1*04:08L
KVTLADAGFIKQ

SEQ ID NO: 21025 - protein, 18 aa, Severe acute respiratory syndrome coronavirus 2
  REGION 1..18: note = Table B: HLA-DPA1*01:03-B1*03:01L
ARDLICAQKFNGLTVLPP

SEQ ID NO: 21026 - protein, 13 aa, Severe acute respiratory syndrome coronavirus 2
  REGION 1..13: note = Table B: HLA-DPA1*01:03-B1*03:01L HLA-DRB1*14:02L HLA-DQA1*05:01-B1*02:01L HLA-DPA1*01:03-B1*04:01L HLA-DPA1*01:03-B1*04:02L HLA-DPA1*02:01-B1*13:01L HLA-DQA1*03:01-B1*03:02L HLA-DPA1*01:03-B1*104:01L
  REGION 1..13: note = CONT. FROM ABOVE: HLA-DPA1*01:02-B1*04:01L
IAQYTSALLAGTI

SEQ ID NO: 21027 - protein, 15 aa, Severe acute respiratory syndrome coronavirus 2
  REGION 1..15: note = Table B: HLA-DPA1*01:03-B1*03:01L HLA-DPA1*01:03-B1*04:02L
SGWTFGAGAALQIPF

SEQ ID NO: 21028 - protein, 13 aa, Severe acute respiratory syndrome coronavirus 2
  REGION 1..13: note = Table B: HLA-DPA1*01:03-B1*03:01L HLA-DRB1*14:01L
AGAALQIPFAMQM

SEQ ID NO: 21029 - protein, 15 aa, Severe acute respiratory syndrome coronavirus 2
  REGION 1..15: note = Table B: HLA-DPA1*01:03-B1*03:01L HLA-DRB1*07:01L
VTQNVLYENQKLIAN

SEQ ID NO: 21030 - protein, 14 aa, Severe acute respiratory syndrome coronavirus 2
  REGION 1..14: note = Table B: HLA-DPA1*01:03-B1*03:01L HLA-DPA1*02:01-B1*13:01L
AIGKIQDSLSSTAS

SEQ ID NO: 21031 - protein, 14 aa, Severe acute respiratory syndrome coronavirus 2
  REGION 1..14: note = Table B: HLA-DPA1*01:03-B1*03:01L
VNQNAQALNTLVKQ

SEQ ID NO: 21032 - protein, 15 aa, Severe acute respiratory syndrome coronavirus 2
  REGION 1..15: note = Table B: HLA-DPA1*01:03-B1*03:01L HLA-DPA1*01:03-B1*104:01L
ILSRLDKVEAEVQID

SEQ ID NO: 21033 - protein, 12 aa, Severe acute respiratory syndrome coronavirus 2
  REGION 1..12: note = Table B: HLA-DPA1*01:03-B1*03:01L
IRASANLAATKM

SEQ ID NO: 21034 - protein, 14 aa, Severe acute respiratory syndrome coronavirus 2
  REGION 1..14: note = Table B: HLA-DPA1*01:03-B1*03:01L HLA-DPA1*01:03-B1*02:01L
ASANLAATKMSECV

SEQ ID NO: 21035 - protein, 13 aa, Severe acute respiratory syndrome coronavirus 2
  REGION 1..13: note = Table B: HLA-DPA1*01:03-B1*03:01L HLA-DPA1*02:01-B1*13:01L HLA-DPA1*03:01-B1*105:01L HLA-DQA1*05:05-B1*03:01L HLA-DQA1*02:01-B1*03:03L
AATKMSECVLGQS

SEQ ID NO: 21036 - protein, 13 aa, Severe acute respiratory syndrome coronavirus 2
  REGION 1..13: note = Table B: HLA-DPA1*01:03-B1*03:01L HLA-DQA1*01:01-B1*05:01L HLA-DQA1*01-B1*05L HLA-DQA1*05:05-B1*03:19L HLA-DPA1*02:01-B1*13:01L
YHLMSFPQSAPHG

SEQ ID NO: 21037 - protein, 12 aa, Severe acute respiratory syndrome coronavirus 2
  REGION 1..12: note = Table B: HLA-DPA1*01:03-B1*03:01L
EKNFTTAPAICH

SEQ ID NO: 21038 - protein, 15 aa, Severe acute respiratory syndrome coronavirus 2
  REGION 1..15: note = Table B: HLA-DPA1*01:03-B1*03:01L
PAICHDGKAHFPREG

SEQ ID NO: 21039 - protein, 13 aa, Severe acute respiratory syndrome coronavirus 2
  REGION 1..13: note = Table B: HLA-DPA1*01:03-B1*03:01L HLA-DQA1*01:01-B1*05:01L HLA-DRB1*04:08L HLA-DRB1*15:03L
DISGINASVVNIQ

SEQ ID NO: 21040 - protein, 11 aa, Severe acute respiratory syndrome coronavirus 2
  REGION 1..11: note = Table B: HLA-DPA1*01:03-B1*03:01L HLA-DQA1*05:05-B1*03:116L HLA-DRB1*04:10L HLA-DPA1*01:02-B1*04:01L HLA-DRB1*15:03L
INASVVNIQKE

SEQ ID NO: 21041 - protein, 16 aa, Severe acute respiratory syndrome coronavirus 2
  REGION 1..16: note = Table B: HLA-DPA1*01:03-B1*03:01L
EDDSEPVLKGVKLHYT

SEQ ID NO: 21042 - protein, 14 aa, Severe acute respiratory syndrome coronavirus 2
  REGION 1..14: note = Table B: HLA-DPA1*01:03-B1*03:01L
IFTIGTVTLKQGEI

SEQ ID NO: 21043 - protein, 14 aa, Severe acute respiratory syndrome coronavirus 2
  REGION 1..14: note = Table B: HLA-DPA1*01:03-B1*03:01L
ATATIPIQASLPFG

SEQ ID NO: 21044 - protein, 14 aa, Severe acute respiratory syndrome coronavirus 2
  REGION 1..14: note = Table B: HLA-DPA1*01:03-B1*03:01L
VGVALLAVFQSASK

SEQ ID NO: 21045 - protein, 13 aa, Severe acute respiratory syndrome coronavirus 2
  REGION 1..13: note = Table B: HLA-DPA1*01:03-B1*03:01L HLA-DQA1*05:05-B1*03:01L
VYSHLLLVAAGLE

SEQ ID NO: 21046 - protein, 11 aa, Severe acute respiratory syndrome coronavirus 2
  REGION 1..11: note = Table B: HLA-DPA1*01:03-B1*03:01L HLA-DRB1*12:01L HLA-DQA1*05:05-B1*03:01L HLA-DRB1*04:08L
FLQSINFVRII

SEQ ID NO: 21047 - protein, 15 aa, Severe acute respiratory syndrome coronavirus 2
  REGION 1..15: note = Table B: HLA-DPA1*01:03-B1*03:01L HLA-DRB1*08:01L HLA-DRB1*11:01L HLA-DPA1*03:01-B1*105:01L
VITSGDGTTSPISEH

SEQ ID NO: 21048 - protein, 15 aa, Severe acute respiratory syndrome coronavirus 2
  REGION 1..15: note = Table B: HLA-DPA1*01:03-B1*03:01L
SGVKDCVVLHSYFTS

SEQ ID NO: 21049 - protein, 16 aa, Severe acute respiratory syndrome coronavirus 2
  REGION 1..16: note = Table B: HLA-DPA1*01:03-B1*03:01L HLA-DQA1*05:01-B1*02:01L HLA-DPA1*01:03-B1*104:01L
VEHVTFFIYNKIVDEP

SEQ ID NO: 21050 - protein, 13 aa, Severe acute respiratory syndrome coronavirus 2
  REGION 1..13: note = Table B: HLA-DPA1*01:03-B1*03:01L HLA-DRB1*11:03L
SFVSEETGTLIVN

SEQ ID NO: 21051 - protein, 13 aa, Severe acute respiratory syndrome coronavirus 2
  REGION 1..13: note = Table B: HLA-DPA1*01:03-B1*03:01L HLA-DQA1*01-B1*05L
VSEETGTLIVNSV

SEQ ID NO: 21052 - protein, 12 aa, Severe acute respiratory syndrome coronavirus 2
  REGION 1..12: note = Table B: HLA-DPA1*01:03-B1*03:01L
LVTLAILTALRL

SEQ ID NO: 21053 - protein, 11 aa, Severe acute respiratory syndrome coronavirus 2
  REGION 1..11: note = Table B: HLA-DPA1*01:03-B1*03:01L HLA-DPA1*03:01-B1*04:02L HLA-DRB1*14:01L HLA-DRB1*14:02L HLA-DPA1*01:03-B1*04:01L HLA-DPA1*02:01-B1*13:01L HLA-DQA1*05:05-B1*03:01L
IVNVSLVKPSF

SEQ ID NO: 21054 - protein, 11 aa, Severe acute respiratory syndrome coronavirus 2
  REGION 1..11: note = Table B: HLA-DPA1*01:03-B1*03:01L
FAYANRNRFLY

SEQ ID NO: 21055 - protein, 14 aa, Severe acute respiratory syndrome coronavirus 2
  REGION 1..14: note = Table B: HLA-DPA1*01:03-B1*03:01L
ITGGIAIAMACLVG

SEQ ID NO: 21056 - protein, 15 aa, Severe acute respiratory syndrome coronavirus 2
  REGION 1..15: note = Table B: HLA-DPA1*01:03-B1*03:01L
FARTRSMWSFNPETN

SEQ ID NO: 21057 - protein, 12 aa, Severe acute respiratory syndrome coronavirus 2
  REGION 1..12: note = Table B: HLA-DPA1*01:03-B1*03:01L HLA-DPA1*01:03-B1*04:02L
SMWSFNPETNIL

SEQ ID NO: 21058 - protein, 15 aa, Severe acute respiratory syndrome coronavirus 2
  REGION 1..15: note = Table B: HLA-DPA1*01:03-B1*03:01L
HGTILTRPLLESELV

SEQ ID NO: 21059 - protein, 15 aa, Severe acute respiratory syndrome coronavirus 2
  REGION 1..15: note = Table B: HLA-DPA1*01:03-B1*03:01L HLA-DPA1*01:03-B1*04:02L
ESELVIGAVILRGHL

SEQ ID NO: 21060 - protein, 12 aa, Severe acute respiratory syndrome coronavirus 2
  REGION 1..12: note = Table B: HLA-DPA1*01:03-B1*03:01L
YKLGASQRVAGD

SEQ ID NO: 21061 - protein, 12 aa, Severe acute respiratory syndrome coronavirus 2
  REGION 1..12: note = Table B: HLA-DPA1*01:03-B1*03:01L
LVDFQVTIAEIL

SEQ ID NO: 21062 - protein, 15 aa, Severe acute respiratory syndrome coronavirus 2
  REGION 1..15: note = Table B: HLA-DPA1*01:03-B1*03:01L
IAEILLIIMRTFKVS

SEQ ID NO: 21063 - protein, 14 aa, Severe acute respiratory syndrome coronavirus 2
  REGION 1..14: note = Table B: HLA-DPA1*01:03-B1*03:01L HLA-DPA1*01:03-B1*04:02L
LITLATCELYHYQE

SEQ ID NO: 21064 - protein, 15 aa, Severe acute respiratory syndrome coronavirus 2
  REGION 1..15: note = Table B: HLA-DPA1*01:03-B1*03:01L HLA-DRB1*03:01L HLA-DRB1*11:02L HLA-DRB1*14:02L HLA-DPA1*01:03-B1*04:02L HLA-DPA1*01:03-B1*02:01L HLA-DRB1*14:17L HLA-DRB1*08:02L HLA-DRB1*08:03L
SKWYIRVGARKSAPL

SEQ ID NO: 21065 - protein, 14 aa, Severe acute respiratory syndrome coronavirus 2
  REGION 1..14: note = Table B: HLA-DPA1*01:03-B1*03:01L HLA-DPA1*02:01-B1*13:01L HLA-DPA1*01:03-B1*104:01L
GARKSAPLIELCVD

SEQ ID NO: 21066 - protein, 13 aa, Severe acute respiratory syndrome coronavirus 2
  REGION 1..13: note = Table B: HLA-DPA1*01:03-B1*03:01L
DIGNYTVSCLPFT

SEQ ID NO: 21067 - protein, 20 aa, Severe acute respiratory syndrome coronavirus 2
  REGION 1..20: note = Table B: HLA-DPA1*01:03-B1*03:01L
SPDDQIGYYRRATRRIRGGD

SEQ ID NO: 21068 - protein, 10 aa, Severe acute respiratory syndrome coronavirus 2
  REGION 1..10: note = Table B: HLA-DPA1*01:03-B1*03:01L HLA-DRB1*03:01L HLA-DRB1*11:02L HLA-DQA1*01-B1*05L HLA-DQA1*05:05-B1*03:19M HLA-DQA1*05:01-B1*02:01L HLA-DRB4*01:01L HLA-DPA1*01:03-B1*104:01L HLA-DRB1*16:01L
  REGION 1..10: note = CONT. FROM ABOVE: HLA-DQA1*02:01-B1*03:03L
KDLSPRWYFY

SEQ ID NO: 21069 - protein, 14 aa, Severe acute respiratory syndrome coronavirus 2
  REGION 1..14: note = Table B: HLA-DPA1*01:03-B1*03:01L HLA-DRB1*13:01L
ALLLLDRLNQLESK

SEQ ID NO: 21070 - protein, 17 aa, Severe acute respiratory syndrome coronavirus 2
  REGION 1..17: note = Table B: HLA-DPA1*01:03-B1*03:01L HLA-DRB1*11:02L
ATKAYNVTQAFGRRGPE

SEQ ID NO: 21071 - protein, 14 aa, Severe acute respiratory syndrome coronavirus 2
  REGION 1..14: note = Table B: HLA-DPA1*01:03-B1*03:01L HLA-DQA1*05:05-B1*03:19L HLA-DPA1*03:01-B1*105:01L HLA-DRB1*04:08L
HWPQIAQFAPSASA

SEQ ID NO: 21072 - protein, 19 aa, Severe acute respiratory syndrome coronavirus 2
  REGION 1..19: note = Table B: HLA-DPA1*01:03-B1*03:01L HLA-DPA1*01:03-B1*104:01L
PSASAFFGMSRIGMEVTPS

SEQ ID NO: 21073 - protein, 12 aa, Severe acute respiratory syndrome coronavirus 2
  REGION 1..12: note = Table B: HLA-DPA1*01:03-B1*03:01L HLA-DRB1*03:01L HLA-DRB1*11:03L HLA-DRB1*14:02L HLA-DRB1*11:01L HLA-DRB3*01:01L
GAIKLDDKDPNF

SEQ ID NO: 21074 - protein, 12 aa, Severe acute respiratory syndrome coronavirus 2
  REGION 1..12: note = Table B: HLA-DPA1*01:03-B1*03:01L HLA-DRB1*14:02L HLA-DQA1*05:01-B1*02:01L
IKLDDKDPNFKD

SEQ ID NO: 21075 - protein, 16 aa, Severe acute respiratory syndrome coronavirus 2
  REGION 1..16: note = Table B: HLA-DPA1*03:01-B1*04:02L HLA-DRB1*03:01L HLA-DRB1*11:02L HLA-DRB1*14:02L HLA-DQA1*05:05-B1*03:19L HLA-DRB1*13:01L HLA-DQA1*05:05-B1*03:116L HLA-DPA1*01:03-B1*04:02L HLA-DPA1*02:01-B1*13:01L
  REGION 1..16: note = CONT. FROM ABOVE: HLA-DPA1*03:01-B1*105:01L HLA-DPA1*01:03-B1*02 :01L HLA-DQA1*05:05-B1*03:01L HLA-DPA1*01:02-B1*04:01L HLA-DRB1* 07:01L HLA-DRB1*10:01L HLA-DRB1*08:02L
QPYVFIKRSDARTAPH

SEQ ID NO: 21076 - protein, 13 aa, Severe acute respiratory syndrome coronavirus 2
  REGION 1..13: note = Table B: HLA-DPA1*03:01-B1*04:02L HLA-DPA1*01:02-B1*04:01L
VLVPHVGEIPVAY

SEQ ID NO: 21077 - protein, 12 aa, Severe acute respiratory syndrome coronavirus 2
  REGION 1..12: note = Table B: HLA-DPA1*03:01-B1*04:02L HLA-DPA1*01:03-B1*04:01L HLA-DRB1*12:01L HLA-DPA1*01:02-B1*04:01L HLA-DRB1*16:01L HLA-DRB1*15:03L
GDELGTDPYEDF

SEQ ID NO: 21078 - protein, 11 aa, Severe acute respiratory syndrome coronavirus 2
  REGION 1..11: note = Table B: HLA-DPA1*03:01-B1*04:02L HLA-DQA1*01-B1*05L HLA-DQA1*05:01-B1*02:01L HLA-DPA1*03:01-B1*105:01L HLA-DQA1*01:03-B1*06:01L
ELGTDPYEDFQ

SEQ ID NO: 21079 - protein, 12 aa, Severe acute respiratory syndrome coronavirus 2
  REGION 1..12: note = Table B: HLA-DPA1*03:01-B1*04:02L HLA-DPA1*03:01-B1*105:01L HLA-DRB1*16:01L HLA-DQA1*01:03-B1*06:01L HLA-DQA1*02:01-B1*03:03L
LGTDPYEDFQEN

SEQ ID NO: 21080 - protein, 16 aa, Severe acute respiratory syndrome coronavirus 2
  REGION 1..16: note = Table B: HLA-DPA1*03:01-B1*04:02L HLA-DRB1*14:02L HLA-DPA1*01:03-B1*04:02L HLA-DPA1*01:03-B1*104:01L
FDTFNGECPNFVFPLN

SEQ ID NO: 21081 - protein, 13 aa, Severe acute respiratory syndrome coronavirus 2
  REGION 1..13: note = Table B: HLA-DPA1*03:01-B1*04:02L HLA-DPA1*01:02-B1*04:01L
TIAFGGCVFSYVG

SEQ ID NO: 21082 - protein, 14 aa, Severe acute respiratory syndrome coronavirus 2
  REGION 1..14: note = Table B: HLA-DPA1*03:01-B1*04:02L
EGLNDNLLEILQKE

SEQ ID NO: 21083 - protein, 16 aa, Severe acute respiratory syndrome coronavirus 2
  REGION 1..16: note = Table B: HLA-DPA1*03:01-B1*04:02L HLA-DQA1*05:05-B1*03:19L
ILQKEKVNINIVGDFK

SEQ ID NO: 21084 - protein, 13 aa, Severe acute respiratory syndrome coronavirus 2
  REGION 1..13: note = Table B: HLA-DPA1*03:01-B1*04:02L HLA-DPA1*01:03-B1*04:01L HLA-DRB1*04:10L HLA-DPA1*02:01-B1*13:01L HLA-DPA1*01:03-B1*104:01L
SASTSAFVETVKG

SEQ ID NO: 21085 - protein, 10 aa, Severe acute respiratory syndrome coronavirus 2
  REGION 1..10: note = Table B: HLA-DPA1*03:01-B1*04:02L HLA-DQA1*05:05-B1*03:19L HLA-DPA1*01:02-B1*04:01L HLA-DRB1*16:01L
GLDYKAFKQI

SEQ ID NO: 21086 - protein, 10 aa, Severe acute respiratory syndrome coronavirus 2
  REGION 1..10: note = Table B: HLA-DPA1*03:01-B1*04:02L HLA-DPA1*03:01-B1*105:01L HLA-DPA1*01:02-B1*04:01L
LDYKAFKQIV

SEQ ID NO: 21087 - protein, 12 aa, Severe acute respiratory syndrome coronavirus 2
  REGION 1..12: note = Table B: HLA-DPA1*03:01-B1*04:02L HLA-DRB1*14:01L HLA-DRB1*12:01L HLA-DQA1*05:05-B1*03:01L HLA-DPA1*01:02-B1*04:01L
GAWNIGEQKSIL

SEQ ID NO: 21088 - protein, 15 aa, Severe acute respiratory syndrome coronavirus 2
  REGION 1..15: note = Table B: HLA-DPA1*03:01-B1*04:02L
TNNLVVMAYITGGVV

SEQ ID NO: 21089 - protein, 11 aa, Severe acute respiratory syndrome coronavirus 2
  REGION 1..11: note = Table B: HLA-DPA1*03:01-B1*04:02L
SQWLTNIFGTV

SEQ ID NO: 21090 - protein, 10 aa, Severe acute respiratory syndrome coronavirus 2
  REGION 1..10: note = Table B: HLA-DPA1*03:01-B1*04:02L HLA-DQA1*01-B1*05L HLA-DPA1*03:01-B1*105:01L HLA-DQA1*03:01-B1*03:02L HLA-DPA1*01:02-B1*04:01L HLA-DRB1*16:01L HLA-DQA1*02:01-B1*03:03L HLA-DRB1*15:03L
VYEKLKPVLD

SEQ ID NO: 21091 - protein, 12 aa, Severe acute respiratory syndrome coronavirus 2
  REGION 1..12: note = Table B: HLA-DPA1*03:01-B1*04:02L HLA-DPA1*03:01-B1*105:01L
VLDWLEEKFKEG

SEQ ID NO: 21092 - protein, 11 aa, Severe acute respiratory syndrome coronavirus 2
  REGION 1..11: note = Table B: HLA-DPA1*03:01-B1*04:02L HLA-DQA1*01-B1*05L
VEFLRDGWEIV

SEQ ID NO: 21093 - protein, 13 aa, Severe acute respiratory syndrome coronavirus 2
  REGION 1..13: note = Table B: HLA-DPA1*03:01-B1*04:02L HLA-DQA1*05:05-B1*03:01L HLA-DQA1*01:03-B1*06:01L
VKFISTCACEIVG

SEQ ID NO: 21094 - protein, 12 aa, Severe acute respiratory syndrome coronavirus 2
  REGION 1..12: note = Table B: HLA-DPA1*03:01-B1*04:02L
SVQTFFKLVNKF

SEQ ID NO: 21095 - protein, 11 aa, Severe acute respiratory syndrome coronavirus 2
  REGION 1..11: note = Table B: HLA-DPA1*03:01-B1*04:02L HLA-DQA1*05:05-B1*03:19L HLA-DPA1*01:03-B1*104:01L HLA-DRB1*16:01L
GETFVTHSKGL

SEQ ID NO: 21096 - protein, 18 aa, Severe acute respiratory syndrome coronavirus 2
  REGION 1..18: note = Table B: HLA-DPA1*03:01-B1*04:02L HLA-DRB1*03:01L HLA-DRB1*11:02L HLA-DPA1*01:03-B1*04:02L HLA-DPA1*01:02-B1*04:01L
PNMMVTNNTFTLKGGAPT

SEQ ID NO: 21097 - protein, 13 aa, Severe acute respiratory syndrome coronavirus 2
  REGION 1..13: note = Table B: HLA-DPA1*03:01-B1*04:02L
DDTVIEVQGYKSV

SEQ ID NO: 21098 - protein, 15 aa, Severe acute respiratory syndrome coronavirus 2
  REGION 1..15: note = Table B: HLA-DPA1*03:01-B1*04:02L HLA-DPA1*01:03-B1*04:02L
TPLGIDLDEWSMATY

SEQ ID NO: 21099 - protein, 13 aa, Severe acute respiratory syndrome coronavirus 2
  REGION 1..13: note = Table B: HLA-DPA1*03:01-B1*04:02L HLA-DPA1*03:01-B1*105:01L
LDEWSMATYYLFD

SEQ ID NO: 21100 - protein, 14 aa, Severe acute respiratory syndrome coronavirus 2
  REGION 1..14: note = Table B: HLA-DPA1*03:01-B1*04:02L HLA-DPA1*03:01-B1*105:01L HLA-DPA1*01:02-B1*04:01L
FKLASHMYCSFYPP

SEQ ID NO: 21101 - protein, 11 aa, Severe acute respiratory syndrome coronavirus 2
  REGION 1..11: note = Table B: HLA-DPA1*03:01-B1*04:02L HLA-DRB1*14:01L HLA-DPA1*03:01-B1*105:01L HLA-DRB1*15:03L
TIVEVQPQLEM

SEQ ID NO: 21102 - protein, 11 aa, Severe acute respiratory syndrome coronavirus 2
  REGION 1..11: note = Table B: HLA-DPA1*03:01-B1*04:02L HLA-DQA1*05:01-B1*02:01L HLA-DRB1*12:01L HLA-DPA1*03:01-B1*105:01L HLA-DRB1*15:03L
IQLLKSAYENF

SEQ ID NO: 21103 - protein, 12 aa, Severe acute respiratory syndrome coronavirus 2
  REGION 1..12: note = Table B: HLA-DPA1*03:01-B1*04:02L HLA-DRB1*14:01L HLA-DPA1*03:01-B1*105:01L
NFNQHEVLLAPL

SEQ ID NO: 21104 - protein, 10 aa, Severe acute respiratory syndrome coronavirus 2
  REGION 1..10: note = Table B: HLA-DPA1*03:01-B1*04:02L HLA-DPA1*03:01-B1*105:01L HLA-DPA1*01:02-B1*04:01L
LVSSFLEMKS

SEQ ID NO: 21105 - protein, 10 aa, Severe acute respiratory syndrome coronavirus 2
  REGION 1..10: note = Table B: HLA-DPA1*03:01-B1*04:02L HLA-DPA1*01:03-B1*04:01L HLA-DPA1*03:01-B1*105:01L HLA-DPA1*01:02-B1*04:01L
TLEETKFLTE

SEQ ID NO: 21106 - protein, 13 aa, Severe acute respiratory syndrome coronavirus 2
  REGION 1..13: note = Table B: HLA-DPA1*03:01-B1*04:02L HLA-DRB1*12:01L HLA-DRB1*15:03L
LGTVSWNLREMLA

SEQ ID NO: 21107 - protein, 14 aa, Severe acute respiratory syndrome coronavirus 2
  REGION 1..14: note = Table B: HLA-DPA1*03:01-B1*04:02L HLA-DRB1*03:01L HLA-DRB1*11:02L HLA-DRB1*11:03L HLA-DRB1*14:02L HLA-DQA1*05:05-B1*03:116L HLA-DPA1*01:03-B1*02:01L HLA-DRB1*08:02L
ARYMRSLKVPATVS

SEQ ID NO: 21108 - protein, 19 aa, Severe acute respiratory syndrome coronavirus 2
  REGION 1..19: note = Table B: HLA-DPA1*03:01-B1*04:02L
IKPHNSHEGKTFYVLPNDD

SEQ ID NO: 21109 - protein, 12 aa, Severe acute respiratory syndrome coronavirus 2
  REGION 1..12: note = Table B: HLA-DPA1*03:01-B1*04:02L HLA-DPA1*03:01-B1*105:01L
RVEAFEYYHTTD

SEQ ID NO: 21110 - protein, 15 aa, Severe acute respiratory syndrome coronavirus 2
  REGION 1..15: note = Table B: HLA-DPA1*03:01-B1*04:02L HLA-DRB1*11:02L HLA-DPA1*03:01-B1*105:01L
SALNHTKKWKYPQVN

SEQ ID NO: 21111 - protein, 12 aa, Severe acute respiratory syndrome coronavirus 2
  REGION 1..12: note = Table B: HLA-DPA1*03:01-B1*04:02L HLA-DRB1*12:01L HLA-DRB1*16:01L
LTSIKWADNNCY

SEQ ID NO: 21112 - protein, 13 aa, Severe acute respiratory syndrome coronavirus 2
  REGION 1..13: note = Table B: HLA-DPA1*03:01-B1*04:02L
DNNCYLATALLTL

SEQ ID NO: 21113 - protein, 10 aa, Severe acute respiratory syndrome coronavirus 2
  REGION 1..10: note = Table B: HLA-DPA1*03:01-B1*04:02L HLA-DPA1*03:01-B1*105:01L HLA-DPA1*01:02-B1*04:01L HLA-DQA1*01:03-B1*06:01L
YLATALLTLQ

SEQ ID NO: 21114 - protein, 12 aa, Severe acute respiratory syndrome coronavirus 2
  REGION 1..12: note = Table B: HLA-DPA1*03:01-B1*04:02L HLA-DQA1*05:01-B1*02:01L HLA-DRB1*12:01L
VMYMGTLSYEQF

SEQ ID NO: 21115 - protein, 11 aa, Severe acute respiratory syndrome coronavirus 2
  REGION 1..11: note = Table B: HLA-DPA1*03:01-B1*04:02L HLA-DPA1*03:01-B1*105:01L HLA-DRB1*16:01L HLA-DRB1*04:08L
NYQCGHYKHIT

SEQ ID NO: 21116 - protein, 16 aa, Severe acute respiratory syndrome coronavirus 2
  REGION 1..16: note = Table B: HLA-DPA1*03:01-B1*04:02L
KHITSKETLYCIDGAL

SEQ ID NO: 21117 - protein, 17 aa, Severe acute respiratory syndrome coronavirus 2
  REGION 1..17: note = Table B: HLA-DPA1*03:01-B1*04:02L
SKETLYCIDGALLTKSS

SEQ ID NO: 21118 - protein, 13 aa, Severe acute respiratory syndrome coronavirus 2
  REGION 1..13: note = Table B: HLA-DPA1*03:01-B1*04:02L HLA-DRB1*15:03L
GPITDVFYKENSY

SEQ ID NO: 21119 - protein, 15 aa, Severe acute respiratory syndrome coronavirus 2
  REGION 1..15: note = Table B: HLA-DPA1*03:01-B1*04:02L
LNQLTGYKKPASREL

SEQ ID NO: 21120 - protein, 10 aa, Severe acute respiratory syndrome coronavirus 2
  REGION 1..10: note = Table B: HLA-DPA1*03:01-B1*04:02L HLA-DPA1*03:01-B1*105:01L HLA-DPA1*01:02-B1*04:01L
ELKVTFFPDL

SEQ ID NO: 21121 - protein, 10 aa, Severe acute respiratory syndrome coronavirus 2
  REGION 1..10: note = Table B: HLA-DPA1*03:01-B1*04:02L HLA-DQA1*01-B1*05L HLA-DPA1*01:03-B1*04:01L HLA-DPA1*03:01-B1*105:01L HLA-DPA1*01:02-B1*04:01L HLA-DQA1*01:03-B1*06:01L
LKVTFFPDLN

SEQ ID NO: 21122 - protein, 12 aa, Severe acute respiratory syndrome coronavirus 2
  REGION 1..12: note = Table B: HLA-DPA1*03:01-B1*04:02L HLA-DPA1*03:01-B1*105:01L HLA-DRB1*15:03L
VAIDYKHYTPSF

SEQ ID NO: 21123 - protein, 17 aa, Severe acute respiratory syndrome coronavirus 2
  REGION 1..17: note = Table B: HLA-DPA1*03:01-B1*04:02L HLA-DPA1*01:03-B1*104:01L HLA-DPA1*01:02-B1*04:01L
KPVETSNSFDVLKSEDA

SEQ ID NO: 21124 - protein, 11 aa, Severe acute respiratory syndrome coronavirus 2
  REGION 1..11: note = Table B: HLA-DPA1*03:01-B1*04:02L HLA-DPA1*01:03-B1*04:01L HLA-DPA1*02:01-B1*13:01L
VVENPTIQKDV

SEQ ID NO: 21125 - protein, 12 aa, Severe acute respiratory syndrome coronavirus 2
  REGION 1..12: note = Table B: HLA-DPA1*03:01-B1*04:02L HLA-DQA1*01-B1*05L HLA-DQA1*05:01-B1*02:01L HLA-DPA1*01:03-B1*04:01L HLA-DPA1*01:03-B1*04:02L HLA-DPA1*01:02-B1*04:01L HLA-DRB1*16:01L
AAVNSVPWDTIA

SEQ ID NO: 21126 - protein, 12 aa, Severe acute respiratory syndrome coronavirus 2
  REGION 1..12: note = Table B: HLA-DPA1*03:01-B1*04:02L HLA-DRB1*12:01L
VNSVPWDTIANY

SEQ ID NO: 21127 - protein, 11 aa, Severe acute respiratory syndrome coronavirus 2
  REGION 1..11: note = Table B: HLA-DPA1*03:01-B1*04:02L
TNYMPYFFTLL

SEQ ID NO: 21128 - protein, 11 aa, Severe acute respiratory syndrome coronavirus 2
  REGION 1..11: note = Table B: HLA-DPA1*03:01-B1*04:02L HLA-DPA1*03:01-B1*105:01L
MPYFFTLLLQL

SEQ ID NO: 21129 - protein, 11 aa, Severe acute respiratory syndrome coronavirus 2
  REGION 1..11: note = Table B: HLA-DPA1*03:01-B1*04:02L
TFTRSTNSRIK

SEQ ID NO: 21130 - protein, 13 aa, Severe acute respiratory syndrome coronavirus 2
  REGION 1..13: note = Table B: HLA-DPA1*03:01-B1*04:02L
VGKFCLEASFNYL

SEQ ID NO: 21131 - protein, 11 aa, Severe acute respiratory syndrome coronavirus 2
  REGION 1..11: note = Table B: HLA-DPA1*03:01-B1*04:02L HLA-DQA1*01-B1*05L HLA-DPA1*03:01-B1*105:01L HLA-DQA1*01:03-B1*06:01L
ITISSFKWDLT

SEQ ID NO: 21132 - protein, 11 aa, Severe acute respiratory syndrome coronavirus 2
  REGION 1..11: note = Table B: HLA-DPA1*03:01-B1*04:02L HLA-DPA1*03:01-B1*105:01L HLA-DPA1*01:02-B1*04:01L
FKWDLTAFGLV

SEQ ID NO: 21133 - protein, 11 aa, Severe acute respiratory syndrome coronavirus 2
  REGION 1..11: note = Table B: HLA-DPA1*03:01-B1*04:02L HLA-DPA1*01:03-B1*04:01L HLA-DPA1*01:03-B1*04:02L HLA-DPA1*03:01-B1*105:01L HLA-DPA1*01:02-B1*04:01L HLA-DRB1*16:01L
KWDLTAFGLVA

SEQ ID NO: 21134 - protein, 11 aa, Severe acute respiratory syndrome coronavirus 2
  REGION 1..11: note = Table B: HLA-DPA1*03:01-B1*04:02L HLA-DPA1*03:01-B1*105:01L HLA-DPA1*01:02-B1*04:01L HLA-DQA1*01:03-B1*06:01L
WDLTAFGLVAE

SEQ ID NO: 21135 - protein, 10 aa, Severe acute respiratory syndrome coronavirus 2
  REGION 1..10: note = Table B: HLA-DPA1*03:01-B1*04:02L HLA-DPA1*03:01-B1*105:01L HLA-DPA1*01:02-B1*04:01L
WFLAYILFTR

SEQ ID NO: 21136 - protein, 10 aa, Severe acute respiratory syndrome coronavirus 2
  REGION 1..10: note = Table B: HLA-DPA1*03:01-B1*04:02L HLA-DPA1*02:01-B1*13:01L HLA-DPA1*03:01-B1*105:01L HLA-DPA1*01:02-B1*04:01L HLA-DQA1*01:03-B1*06:01L HLA-DRB1*15:03L
ILFTRFFYVL

SEQ ID NO: 21137 - protein, 12 aa, Severe acute respiratory syndrome coronavirus 2
  REGION 1..12: note = Table B: HLA-DPA1*03:01-B1*04:02L HLA-DPA1*03:01-B1*105:01L HLA-DRB1*15:03L
IMQLFFSYFAVH

SEQ ID NO: 21138 - protein, 10 aa, Severe acute respiratory syndrome coronavirus 2
  REGION 1..10: note = Table B: HLA-DPA1*03:01-B1*04:02L HLA-DPA1*03:01-B1*105:01L HLA-DPA1*01:02-B1*04:01L
YFAVHFISNS

SEQ ID NO: 21139 - protein, 11 aa, Severe acute respiratory syndrome coronavirus 2
  REGION 1..11: note = Table B: HLA-DPA1*03:01-B1*04:02L
VHFISNSWLMW

SEQ ID NO: 21140 - protein, 10 aa, Severe acute respiratory syndrome coronavirus 2
  REGION 1..10: note = Table B: HLA-DPA1*03:01-B1*04:02L
FISNSWLMWL

SEQ ID NO: 21141 - protein, 11 aa, Severe acute respiratory syndrome coronavirus 2
  REGION 1..11: note = Table B: HLA-DPA1*03:01-B1*04:02L HLA-DPA1*01:03-B1*04:02L
IFFASFYYVWK

SEQ ID NO: 21142 - protein, 10 aa, Severe acute respiratory syndrome coronavirus 2
  REGION 1..10: note = Table B: HLA-DPA1*03:01-B1*04:02L HLA-DPA1*01:03-B1*04:01L HLA-DPA1*03:01-B1*105:01L HLA-DPA1*01:02-B1*04:01L HLA-DRB1*16:01L HLA-DQA1*01:03-B1*06:01L
YVWKSYVHVV

SEQ ID NO: 21143 - protein, 16 aa, Severe acute respiratory syndrome coronavirus 2
  REGION 1..16: note = Table B: HLA-DPA1*03:01-B1*04:02L
YERHSLSHFVNLDNLR

SEQ ID NO: 21144 - protein, 15 aa, Severe acute respiratory syndrome coronavirus 2
  REGION 1..15: note = Table B: HLA-DPA1*03:01-B1*04:02L HLA-DRB1*11:01L
LPINVIVFDGKSKCE

SEQ ID NO: 21145 - protein, 13 aa, Severe acute respiratory syndrome coronavirus 2
  REGION 1..13: note = Table B: HLA-DPA1*03:01-B1*04:02L HLA-DPA1*03:01-B1*105:01L
YSQLMCQPILLLD

SEQ ID NO: 21146 - protein, 13 aa, Severe acute respiratory syndrome coronavirus 2
  REGION 1..13: note = Table B: HLA-DPA1*03:01-B1*04:02L HLA-DPA1*01:02-B1*04:01L HLA-DQA1*01:03-B1*06:01L
SQLMCQPILLLDQ

SEQ ID NO: 21147 - protein, 11 aa, Severe acute respiratory syndrome coronavirus 2
  REGION 1..11: note = Table B: HLA-DPA1*03:01-B1*04:02L HLA-DRB1*14:01L HLA-DRB1*12:01L
STFISAARQGF

SEQ ID NO: 21148 - protein, 13 aa, Severe acute respiratory syndrome coronavirus 2
  REGION 1..13: note = Table B: HLA-DPA1*03:01-B1*04:02L
SAARQGFVDSDVE

SEQ ID NO: 21149 - protein, 12 aa, Severe acute respiratory syndrome coronavirus 2
  REGION 1..12: note = Table B: HLA-DPA1*03:01-B1*04:02L HLA-DPA1*03:01-B1*105:01L HLA-DRB1*15:03L
YMLTYNKVENMT

SEQ ID NO: 21150 - protein, 10 aa, Severe acute respiratory syndrome coronavirus 2
  REGION 1..10: note = Table B: HLA-DPA1*03:01-B1*04:02L HLA-DPA1*01:02-B1*04:01L
WNVKDFMSLS

SEQ ID NO: 21151 - protein, 12 aa, Severe acute respiratory syndrome coronavirus 2
  REGION 1..12: note = Table B: HLA-DPA1*03:01-B1*04:02L HLA-DRB1*14:01L HLA-DRB1*12:01L HLA-DRB1*16:01L
GGKIVNNWLKQL

SEQ ID NO: 21152 - protein, 14 aa, Severe acute respiratory syndrome coronavirus 2
  REGION 1..14: note = Table B: HLA-DPA1*03:01-B1*04:02L
VITREVGFVVPGLP

SEQ ID NO: 21153 - protein, 13 aa, Severe acute respiratory syndrome coronavirus 2
  REGION 1..13: note = Table B: HLA-DPA1*03:01-B1*04:02L HLA-DRB1*12:01L HLA-DQA1*03:01-B1*03:02L
TNGDFLHFLPRVF

SEQ ID NO: 21154 - protein, 12 aa, Severe acute respiratory syndrome coronavirus 2
  REGION 1..12: note = Table B: HLA-DPA1*03:01-B1*04:02L HLA-DPA1*03:01-B1*105:01L
FLPRVFSAVGNI

SEQ ID NO: 21155 - protein, 11 aa, Severe acute respiratory syndrome coronavirus 2
  REGION 1..11: note = Table B: HLA-DPA1*03:01-B1*04:02L HLA-DPA1*01:02-B1*04:01L
NICYTPSKLIE

SEQ ID NO: 21156 - protein, 12 aa, Severe acute respiratory syndrome coronavirus 2
  REGION 1..12: note = Table B: HLA-DPA1*03:01-B1*04:02L
ICYTPSKLIEYT

SEQ ID NO: 21157 - protein, 12 aa, Severe acute respiratory syndrome coronavirus 2
  REGION 1..12: note = Table B: HLA-DPA1*03:01-B1*04:02L HLA-DQA1*01:01-B1*05:01L HLA-DRB1*08:01L HLA-DPA1*01:03-B1*04:02L HLA-DRB1*12:01L HLA-DQA1*05:05-B1*03:01L HLA-DRB1*04:08L
GSVAYESLRPDT

SEQ ID NO: 21158 - protein, 13 aa, Severe acute respiratory syndrome coronavirus 2
  REGION 1..13: note = Table B: HLA-DPA1*03:01-B1*04:02L HLA-DPA1*03:01-B1*105:01L HLA-DPA1*01:02-B1*04:01L HLA-DRB1*04:08L HLA-DRB1*15:03L
GRWVLNNDYYRSL

SEQ ID NO: 21159 - protein, 12 aa, Severe acute respiratory syndrome coronavirus 2
  REGION 1..12: note = Table B: HLA-DPA1*03:01-B1*04:02L HLA-DPA1*01:03-B1*04:01L HLA-DPA1*01:03-B1*04:02L HLA-DPA1*03:01-B1*105:01L HLA-DPA1*01:02-B1*04:01L HLA-DRB1*16:01L HLA-DQA1*01:03-B1*06:01L HLA-DRB1*15:03L
WVLNNDYYRSLP

SEQ ID NO: 21160 - protein, 12 aa, Severe acute respiratory syndrome coronavirus 2
  REGION 1..12: note = Table B: HLA-DPA1*03:01-B1*04:02L HLA-DPA1*03:01-B1*105:01L HLA-DPA1*01:02-B1*04:01L HLA-DQA1*01:03-B1*06:01L
LLTNMFTPLIQP

SEQ ID NO: 21161 - protein, 12 aa, Severe acute respiratory syndrome coronavirus 2
  REGION 1..12: note = Table B: HLA-DPA1*03:01-B1*04:02L HLA-DPA1*03:01-B1*105:01L
VVAFNTLLFLMS

SEQ ID NO: 21162 - protein, 13 aa, Severe acute respiratory syndrome coronavirus 2
  REGION 1..13: note = Table B: HLA-DPA1*03:01-B1*04:02L
LMSFTVLCLTPVY

SEQ ID NO: 21163 - protein, 13 aa, Severe acute respiratory syndrome coronavirus 2
  REGION 1..13: note = Table B: HLA-DPA1*03:01-B1*04:02L HLA-DPA1*01:03-B1*04:01L HLA-DPA1*01:03-B1*04:02L HLA-DPA1*01:02-B1*04:01L
LPGVYSVIYLYLT

SEQ ID NO: 21164 - protein, 12 aa, Severe acute respiratory syndrome coronavirus 2
  REGION 1..12: note = Table B: HLA-DPA1*03:01-B1*04:02L HLA-DPA1*03:01-B1*105:01L
AHIQWMVMFTPL

SEQ ID NO: 21165 - protein, 13 aa, Severe acute respiratory syndrome coronavirus 2
  REGION 1..13: note = Table B: HLA-DPA1*03:01-B1*04:02L HLA-DRB1*15:03L
HIQWMVMFTPLVP

SEQ ID NO: 21166 - protein, 11 aa, Severe acute respiratory syndrome coronavirus 2
  REGION 1..11: note = Table B: HLA-DPA1*03:01-B1*04:02L HLA-DPA1*03:01-B1*105:01L HLA-DRB1*15:03L
WMVMFTPLVPF

SEQ ID NO: 21167 - protein, 12 aa, Severe acute respiratory syndrome coronavirus 2
  REGION 1..12: note = Table B: HLA-DPA1*03:01-B1*04:02L HLA-DQA1*01-B1*05L HLA-DRB1*15:03L
TKHFYWFFSNYL

SEQ ID NO: 21168 - protein, 11 aa, Severe acute respiratory syndrome coronavirus 2
  REGION 1..11: note = Table B: HLA-DPA1*03:01-B1*04:02L
VFNGVSFSTFE

SEQ ID NO: 21169 - protein, 11 aa, Severe acute respiratory syndrome coronavirus 2
  REGION 1..11: note = Table B: HLA-DPA1*03:01-B1*04:02L HLA-DQA1*01-B1*05L HLA-DPA1*01:03-B1*04:01L HLA-DPA1*03:01-B1*105:01L HLA-DPA1*01:02-B1*04:01L HLA-DQA1*01:03-B1*06:01L
NGVSFSTFEEA

SEQ ID NO: 21170 - protein, 10 aa, Severe acute respiratory syndrome coronavirus 2
  REGION 1..10: note = Table B: HLA-DPA1*03:01-B1*04:02L HLA-DPA1*01:02-B1*04:01L
LLNKEMYLKL

SEQ ID NO: 21171 - protein, 12 aa, Severe acute respiratory syndrome coronavirus 2
  REGION 1..12: note = Table B: HLA-DPA1*03:01-B1*04:02L HLA-DPA1*03:01-B1*105:01L HLA-DRB1*16:01L HLA-DRB1*15:03L
YLKLRSDVLLPL

SEQ ID NO: 21172 - protein, 12 aa, Severe acute respiratory syndrome coronavirus 2
  REGION 1..12: note = Table B: HLA-DPA1*03:01-B1*04:02L HLA-DRB1*16:01L HLA-DQA1*01:03-B1*06:01L HLA-DRB1*04:08L
LKLRSDVLLPLT

SEQ ID NO: 21173 - protein, 16 aa, Severe acute respiratory syndrome coronavirus 2
  REGION 1..16: note = Table B: HLA-DPA1*03:01-B1*04:02L HLA-DRB1*14:02L HLA-DQA1*05:05-B1*03:01L
DTTSYREAACCHLAKA

SEQ ID NO: 21174 - protein, 12 aa, Severe acute respiratory syndrome coronavirus 2
  REGION 1..12: note = Table B: HLA-DPA1*03:01-B1*04:02L HLA-DPA1*02:01-B1*13:01L
MLNPNYEDLLIR

SEQ ID NO: 21175 - protein, 16 aa, Severe acute respiratory syndrome coronavirus 2
  REGION 1..16: note = Table B: HLA-DPA1*03:01-B1*04:02L HLA-DQA1*05:05-B1*03:19L
YEDLLIRKSNHNFLVQ

SEQ ID NO: 21176 - protein, 15 aa, Severe acute respiratory syndrome coronavirus 2
  REGION 1..15: note = Table B: HLA-DPA1*03:01-B1*04:02L HLA-DRB1*11:02L HLA-DRB4*02:01NL HLA-DRB4*01:01L HLA-DRB1*09:01L HLA-DRB1*07:01L HLA-DRB1*15:01L
VLKLKVDTANPKTPK

SEQ ID NO: 21177 - protein, 18 aa, Severe acute respiratory syndrome coronavirus 2
  REGION 1..18: note = Table B: HLA-DPA1*03:01-B1*04:02L
IQPGQTFSVLACYNGSPS

SEQ ID NO: 21178 - protein, 11 aa, Severe acute respiratory syndrome coronavirus 2
  REGION 1..11: note = Table B: HLA-DPA1*03:01-B1*04:02L HLA-DPA1*03:01-B1*105:01L
IDYDCVSFCYM

SEQ ID NO: 21179 - protein, 14 aa, Severe acute respiratory syndrome coronavirus 2
  REGION 1..14: note = Table B: HLA-DPA1*03:01-B1*04:02L HLA-DPA1*01:03-B1*04:02L HLA-DPA1*02:01-B1*13:01L HLA-DPA1*01:02-B1*04:01L HLA-DRB1*16:01L HLA-DQA1*02:01-B1*03:03L HLA-DRB1*15:03L
GTDLEGNFYGPFVD

SEQ ID NO: 21180 - protein, 13 aa, Severe acute respiratory syndrome coronavirus 2
  REGION 1..13: note = Table B: HLA-DPA1*03:01-B1*04:02L
NRFTTTLNDFNLV

SEQ ID NO: 21181 - protein, 14 aa, Severe acute respiratory syndrome coronavirus 2
  REGION 1..14: note = Table B: HLA-DPA1*03:01-B1*04:02L HLA-DRB1*11:01L HLA-DQA1*05:05-B1*03:116L HLA-DPA1*01:03-B1*04:02L HLA-DPA1*02:01-B1*13:01L HLA-DPA1*01:03-B1*104:01L
GPLSAQTGIAVLDM

SEQ ID NO: 21182 - protein, 13 aa, Severe acute respiratory syndrome coronavirus 2
  REGION 1..13: note = Table B: HLA-DPA1*03:01-B1*04:02L HLA-DPA1*01:02-B1*04:01L HLA-DQA1*01:03-B1*06:01L
NGRTILGSALLED

SEQ ID NO: 21183 - protein, 12 aa, Severe acute respiratory syndrome coronavirus 2
  REGION 1..12: note = Table B: HLA-DPA1*03:01-B1*04:02L HLA-DQA1*05:05-B1*03:19L HLA-DQA1*05:05-B1*03:01L HLA-DRB1*15:03L
TILGSALLEDEF

SEQ ID NO: 21184 - protein, 12 aa, Severe acute respiratory syndrome coronavirus 2
  REGION 1..12: note = Table B: HLA-DPA1*03:01-B1*04:02L HLA-DPA1*01:03-B1*04:01L HLA-DPA1*01:02-B1*04:01L HLA-DQA1*01:03-B1*06:01L
GSALLEDEFTPF

SEQ ID NO: 21185 - protein, 12 aa, Severe acute respiratory syndrome coronavirus 2
  REGION 1..12: note = Table B: HLA-DPA1*03:01-B1*04:02L HLA-DPA1*03:01-B1*105:01L
LLEDEFTPFDVV

SEQ ID NO: 21186 - protein, 13 aa, Severe acute respiratory syndrome coronavirus 2
  REGION 1..13: note = Table B: HLA-DPA1*03:01-B1*04:02L HLA-DPA1*03:01-B1*105:01L
THHWLLLTILTSL

SEQ ID NO: 21187 - protein, 14 aa, Severe acute respiratory syndrome coronavirus 2
  REGION 1..14: note = Table B: HLA-DPA1*03:01-B1*04:02L HLA-DPA1*01:03-B1*04:02L
TILTSLLVLVQSTQ

SEQ ID NO: 21188 - protein, 12 aa, Severe acute respiratory syndrome coronavirus 2
  REGION 1..12: note = Table B: HLA-DPA1*03:01-B1*04:02L
TSLLVLVQSTQW

SEQ ID NO: 21189 - protein, 13 aa, Severe acute respiratory syndrome coronavirus 2
  REGION 1..13: note = Table B: HLA-DPA1*03:01-B1*04:02L
YENAFLPFAMGII

SEQ ID NO: 21190 - protein, 12 aa, Severe acute respiratory syndrome coronavirus 2
  REGION 1..12: note = Table B: HLA-DPA1*03:01-B1*04:02L
NAFLPFAMGIIA

SEQ ID NO: 21191 - protein, 15 aa, Severe acute respiratory syndrome coronavirus 2
  REGION 1..15: note = Table B: HLA-DPA1*03:01-B1*04:02L HLA-DRB1*14:02L
SAFAMMFVKHKHAFL

SEQ ID NO: 21192 - protein, 13 aa, Severe acute respiratory syndrome coronavirus 2
  REGION 1..13: note = Table B: HLA-DPA1*03:01-B1*04:02L
KHAFLCLFLLPSL

SEQ ID NO: 21193 - protein, 14 aa, Severe acute respiratory syndrome coronavirus 2
  REGION 1..14: note = Table B: HLA-DPA1*03:01-B1*04:02L HLA-DRB1*14:01L HLA-DRB1*12:01L
LATVAYFNMVYMPA

SEQ ID NO: 21194 - protein, 12 aa, Severe acute respiratory syndrome coronavirus 2
  REGION 1..12: note = Table B: HLA-DPA1*03:01-B1*04:02L HLA-DQA1*05:01-B1*02:01L
MPASWVMRIMTW

SEQ ID NO: 21195 - protein, 12 aa, Severe acute respiratory syndrome coronavirus 2
  REGION 1..12: note = Table B: HLA-DPA1*03:01-B1*04:02L HLA-DPA1*03:01-B1*105:01L
VMRIMTWLDMVD

SEQ ID NO: 21196 - protein, 12 aa, Severe acute respiratory syndrome coronavirus 2
  REGION 1..12: note = Table B: HLA-DPA1*03:01-B1*04:02L HLA-DRB1*12:01L HLA-DPA1*03:01-B1*105:01L HLA-DPA1*01:02-B1*04:01L HLA-DRB1*15:03L
VLTLVYKVYYGN

SEQ ID NO: 21197 - protein, 12 aa, Severe acute respiratory syndrome coronavirus 2
  REGION 1..12: note = Table B: HLA-DPA1*03:01-B1*04:02L HLA-DPA1*03:01-B1*105:01L
LTLVYKVYYGNA

SEQ ID NO: 21198 - protein, 12 aa, Severe acute respiratory syndrome coronavirus 2
  REGION 1..12: note = Table B: HLA-DPA1*03:01-B1*04:02L
KVYYGNALDQAI

SEQ ID NO: 21199 - protein, 12 aa, Severe acute respiratory syndrome coronavirus 2
  REGION 1..12: note = Table B: HLA-DPA1*03:01-B1*04:02L
GIVFMCVEYCPI

SEQ ID NO: 21200 - protein, 12 aa, Severe acute respiratory syndrome coronavirus 2
  REGION 1..12: note = Table B: HLA-DPA1*03:01-B1*04:02L HLA-DPA1*03:01-B1*105:01L
IVFMCVEYCPIF

SEQ ID NO: 21201 - protein, 18 aa, Severe acute respiratory syndrome coronavirus 2
  REGION 1..18: note = Table B: HLA-DPA1*03:01-B1*04:02L HLA-DRB1*14:02L HLA-DPA1*01:03-B1*04:02L
LPPKNSIDAFKLNIKLLG

SEQ ID NO: 21202 - protein, 15 aa, Severe acute respiratory syndrome coronavirus 2
  REGION 1..15: note = Table B: HLA-DPA1*03:01-B1*04:02L HLA-DQA1*05:05-B1*03:19L HLA-DPA1*01:03-B1*04:02L HLA-DQA1*02:01-B1*03:03L HLA-DRB1*15:03L
SKLWAQCVQLHNDIL

SEQ ID NO: 21203 - protein, 10 aa, Severe acute respiratory syndrome coronavirus 2
  REGION 1..10: note = Table B: HLA-DPA1*03:01-B1*04:02L HLA-DQA1*01-B1*05L HLA-DPA1*03:01-B1*105:01L HLA-DPA1*01:02-B1*04:01L HLA-DQA1*01:03-B1*06:01L
TTEAFEKMVS

SEQ ID NO: 21204 - protein, 13 aa, Severe acute respiratory syndrome coronavirus 2
  REGION 1..13: note = Table B: HLA-DPA1*03:01-B1*04:02L HLA-DPA1*01:02-B1*04:01L
QGAVDINKLCEEM

SEQ ID NO: 21205 - protein, 12 aa, Severe acute respiratory syndrome coronavirus 2
  REGION 1..12: note = Table B: HLA-DPA1*03:01-B1*04:02L HLA-DPA1*03:01-B1*105:01L HLA-DPA1*01:02-B1*04:01L HLA-DQA1*01:03-B1*06:01L
AIASEFSSLPSY

SEQ ID NO: 21206 - protein, 15 aa, Severe acute respiratory syndrome coronavirus 2
  REGION 1..15: note = Table B: HLA-DPA1*03:01-B1*04:02L
TAQEAYEQAVANGDS

SEQ ID NO: 21207 - protein, 15 aa, Severe acute respiratory syndrome coronavirus 2
  REGION 1..15: note = Table B: HLA-DPA1*03:01-B1*04:02L HLA-DRB1*03:01L
AQEAYEQAVANGDSE

SEQ ID NO: 21208 - protein, 16 aa, Severe acute respiratory syndrome coronavirus 2
  REGION 1..16: note = Table B: HLA-DPA1*03:01-B1*04:02L HLA-DQA1*05:05-B1*03:116L
QEAYEQAVANGDSEVV

SEQ ID NO: 21209 - protein, 16 aa, Severe acute respiratory syndrome coronavirus 2
  REGION 1..16: note = Table B: HLA-DPA1*03:01-B1*04:02L HLA-DRB1*14:02L HLA-DQA1*05:05-B1*03:19L HLA-DRB1*13:01L HLA-DPA1*01:03-B1*04:02L HLA-DPA1*01:03-B1*02:01L
DSEVVLKKLKKSLNVA

SEQ ID NO: 21210 - protein, 18 aa, Severe acute respiratory syndrome coronavirus 2
  REGION 1..18: note = Table B: HLA-DPA1*03:01-B1*04:02L HLA-DRB1*14:02L HLA-DQA1*05:05-B1*03:19L HLA-DPA1*01:03-B1*04:02L
SEVVLKKLKKSLNVAKSE

SEQ ID NO: 21211 - protein, 17 aa, Severe acute respiratory syndrome coronavirus 2
  REGION 1..17: note = Table B: HLA-DPA1*03:01-B1*04:02L HLA-DRB1*03:01L HLA-DRB1*09:01L HLA-DPA1*01:03-B1*04:02L HLA-DPA1*01:02-B1*04:01L
LKKSLNVAKSEFDRDAA

SEQ ID NO: 21212 - protein, 11 aa, Severe acute respiratory syndrome coronavirus 2
  REGION 1..11: note = Table B: HLA-DPA1*03:01-B1*04:02L
SAMQTMLFTML

SEQ ID NO: 21213 - protein, 11 aa, Severe acute respiratory syndrome coronavirus 2
  REGION 1..11: note = Table B: HLA-DPA1*03:01-B1*04:02L HLA-DPA1*01:03-B1*04:02L
AMQTMLFTMLR

SEQ ID NO: 21214 - protein, 10 aa, Severe acute respiratory syndrome coronavirus 2
  REGION 1..10: note = Table B: HLA-DPA1*03:01-B1*04:02L HLA-DPA1*01:02-B1*04:01L
TMLFTMLRKL

SEQ ID NO: 21215 - protein, 15 aa, Severe acute respiratory syndrome coronavirus 2
  REGION 1..15: note = Table B: HLA-DPA1*03:01-B1*04:02L HLA-DRB1*14:02L HLA-DRB1*11:01L HLA-DRB4*01:01L
DNDALNNIINNARDG

SEQ ID NO: 21216 - protein, 12 aa, Severe acute respiratory syndrome coronavirus 2
  REGION 1..12: note = Table B: HLA-DPA1*03:01-B1*04:02L HLA-DQA1*05:05-B1*03:19L HLA-DPA1*01:03-B1*04:02L HLA-DQA1*05:05-B1*03:01L
TFTYASALWEIQ

SEQ ID NO: 21217 - protein, 13 aa, Severe acute respiratory syndrome coronavirus 2
  REGION 1..13: note = Table B: HLA-DPA1*03:01-B1*04:02L HLA-DQA1*05:01-B1*02:01L HLA-DRB1*09:01L
IVTALRANSAVKL

SEQ ID NO: 21218 - protein, 11 aa, Severe acute respiratory syndrome coronavirus 2
  REGION 1..11: note = Table B: HLA-DPA1*03:01-B1*04:02L HLA-DPA1*03:01-B1*105:01L HLA-DPA1*01:02-B1*04:01L
RFVLALLSDLQ

SEQ ID NO: 21219 - protein, 13 aa, Severe acute respiratory syndrome coronavirus 2
  REGION 1..13: note = Table B: HLA-DPA1*03:01-B1*04:02L
FVLALLSDLQDLK

SEQ ID NO: 21220 - protein, 12 aa, Severe acute respiratory syndrome coronavirus 2
  REGION 1..12: note = Table B: HLA-DPA1*03:01-B1*04:02L HLA-DPA1*03:01-B1*105:01L HLA-DRB1*16:01L
SDLQDLKWARFP

SEQ ID NO: 21221 - protein, 13 aa, Severe acute respiratory syndrome coronavirus 2
  REGION 1..13: note = Table B: HLA-DPA1*03:01-B1*04:02L HLA-DPA1*03:01-B1*105:01L
DLQDLKWARFPKS

SEQ ID NO: 21222 - protein, 16 aa, Severe acute respiratory syndrome coronavirus 2
  REGION 1..16: note = Table B: HLA-DPA1*03:01-B1*04:02L
ATVRLQAGNATEVPAN

SEQ ID NO: 21223 - protein, 13 aa, Severe acute respiratory syndrome coronavirus 2
  REGION 1..13: note = Table B: HLA-DPA1*03:01-B1*04:02L
STDVVYRAFDIYN

SEQ ID NO: 21224 - protein, 14 aa, Severe acute respiratory syndrome coronavirus 2
  REGION 1..14: note = Table B: HLA-DPA1*03:01-B1*04:02L HLA-DRB1*11:02L HLA-DRB1*11:03L HLA-DRB1*14:02L HLA-DQA1*05:05-B1*03:19L HLA-DRB1*13:01L HLA-DPA1*01:03-B1*04:02L HLA-DPA1*03:01-B1*105:01L HLA-DRB1*08:02L
SYFVVKRHTFSNYQ

SEQ ID NO: 21225 - protein, 12 aa, Severe acute respiratory syndrome coronavirus 2
  REGION 1..12: note = Table B: HLA-DPA1*03:01-B1*04:02L HLA-DPA1*02:01-B1*13:01L
WYDFVENPDILR

SEQ ID NO: 21226 - protein, 12 aa, Severe acute respiratory syndrome coronavirus 2
  REGION 1..12: note = Table B: HLA-DPA1*03:01-B1*04:02L HLA-DQA1*05:01-B1*02:01L HLA-DPA1*03:01-B1*105:01L
GNWYDFGDFIQT

SEQ ID NO: 21227 - protein, 13 aa, Severe acute respiratory syndrome coronavirus 2
  REGION 1..13: note = Table B: HLA-DPA1*03:01-B1*04:02L HLA-DQA1*01:01-B1*05:01L HLA-DPA1*02:01-B1*13:01L
TPGSGVPVVDSYY

SEQ ID NO: 21228 - protein, 12 aa, Severe acute respiratory syndrome coronavirus 2
  REGION 1..12: note = Table B: HLA-DPA1*03:01-B1*04:02L
VDSYYSLLMPIL

SEQ ID NO: 21229 - protein, 13 aa, Severe acute respiratory syndrome coronavirus 2
  REGION 1..13: note = Table B: HLA-DPA1*03:01-B1*04:02L HLA-DPA1*01:02-B1*04:01L
PYIKWDLLKYDFT

SEQ ID NO: 21230 - protein, 14 aa, Severe acute respiratory syndrome coronavirus 2
  REGION 1..14: note = Table B: HLA-DPA1*03:01-B1*04:02L HLA-DRB1*15:03L
FVDGVPFVVSTGYH

SEQ ID NO: 21231 - protein, 13 aa, Severe acute respiratory syndrome coronavirus 2
  REGION 1..13: note = Table B: HLA-DPA1*03:01-B1*04:02L HLA-DPA1*01:02-B1*04:01L HLA-DRB1*16:01L HLA-DRB1*04:08L
SSRLSFKELLVYA

SEQ ID NO: 21232 - protein, 15 aa, Severe acute respiratory syndrome coronavirus 2
  REGION 1..15: note = Table B: HLA-DPA1*03:01-B1*04:02L HLA-DPA1*01:02-B1*04:01L
SRLSFKELLVYAADP

SEQ ID NO: 21233 - protein, 11 aa, Severe acute respiratory syndrome coronavirus 2
  REGION 1..11: note = Table B: HLA-DPA1*03:01-B1*04:02L
LLVYAADPAMH

SEQ ID NO: 21234 - protein, 15 aa, Severe acute respiratory syndrome coronavirus 2
  REGION 1..15: note = Table B: HLA-DPA1*03:01-B1*04:02L HLA-DRB1*11:02L HLA-DQA1*05:05-B1*03:19L HLA-DPA1*01:03-B1*04:02L
GNLLLDKRTTCFSVA

SEQ ID NO: 21235 - protein, 15 aa, Severe acute respiratory syndrome coronavirus 2
  REGION 1..15: note = Table B: HLA-DPA1*03:01-B1*04:02L HLA-DPA1*01:02-B1*04:01L
VAALTNNVAFQTVKP

SEQ ID NO: 21236 - protein, 13 aa, Severe acute respiratory syndrome coronavirus 2
  REGION 1..13: note = Table B: HLA-DPA1*03:01-B1*04:02L HLA-DRB1*08:01L HLA-DPA1*01:03-B1*04:01L HLA-DPA1*02:01-B1*13:01L HLA-DQA1*03:01-B1*03:02L HLA-DPA1*01:02-B1*04:01L HLA-DRB1*16:01L HLA-DRB1*04:08L HLA-DRB1*15:03L
KPGNFNKDFYDFA

SEQ ID NO: 21237 - protein, 12 aa, Severe acute respiratory syndrome coronavirus 2
  REGION 1..12: note = Table B: HLA-DPA1*03:01-B1*04:02L HLA-DQA1*05:01-B1*02:01L HLA-DPA1*03:01-B1*105:01L
NFNKDFYDFAVS

SEQ ID NO: 21238 - protein, 13 aa, Severe acute respiratory syndrome coronavirus 2
  REGION 1..13: note = Table B: HLA-DPA1*03:01-B1*04:02L HLA-DPA1*03:01-B1*105:01L
SDYDYYRYNLPTM

SEQ ID NO: 21239 - protein, 13 aa, Severe acute respiratory syndrome coronavirus 2
  REGION 1..13: note = Table B: HLA-DPA1*03:01-B1*04:02L
VVEVVDKYFDCYD

SEQ ID NO: 21240 - protein, 14 aa, Severe acute respiratory syndrome coronavirus 2
  REGION 1..14: note = Table B: HLA-DPA1*03:01-B1*04:02L HLA-DRB1*16:01L
VEVVDKYFDCYDGG

SEQ ID NO: 21241 - protein, 10 aa, Severe acute respiratory syndrome coronavirus 2
  REGION 1..10: note = Table B: HLA-DPA1*03:01-B1*04:02L HLA-DRB1*14:01L HLA-DPA1*01:02-B1*04:01L HLA-DRB1*16:01L
FAYTKRNVIP

SEQ ID NO: 21242 - protein, 12 aa, Severe acute respiratory syndrome coronavirus 2
  REGION 1..12: note = Table B: HLA-DPA1*03:01-B1*04:02L HLA-DRB1*14:01L
VIPTITQMNLKY

SEQ ID NO: 21243 - protein, 18 aa, Severe acute respiratory syndrome coronavirus 2
  REGION 1..18: note = Table B: HLA-DPA1*03:01-B1*04:02L
MNLKYAISAKNRARTVAG

SEQ ID NO: 21244 - protein, 14 aa, Severe acute respiratory syndrome coronavirus 2
  REGION 1..14: note = Table B: HLA-DPA1*03:01-B1*04:02L HLA-DQA1*01:01-B1*05:01L HLA-DRB1*08:01L HLA-DRB1*11:01L HLA-DPA1*01:03-B1*04:02L
IAATRGATVVIGTS

SEQ ID NO: 21245 - protein, 14 aa, Severe acute respiratory syndrome coronavirus 2
  REGION 1..14: note = Table B: HLA-DPA1*03:01-B1*04:02L HLA-DRB3*01:01L
NMLKTVYSDVENPH

SEQ ID NO: 21246 - protein, 13 aa, Severe acute respiratory syndrome coronavirus 2
  REGION 1..13: note = Table B: HLA-DPA1*03:01-B1*04:02L HLA-DPA1*03:01-B1*105:01L HLA-DRB1*15:03L
NPHLMGWDYPKCD

SEQ ID NO: 21247 - protein, 11 aa, Severe acute respiratory syndrome coronavirus 2
  REGION 1..11: note = Table B: HLA-DPA1*03:01-B1*04:02L HLA-DPA1*03:01-B1*105:01L
TAYANSVFNIC

SEQ ID NO: 21248 - protein, 10 aa, Severe acute respiratory syndrome coronavirus 2
  REGION 1..10: note = Table B: HLA-DPA1*03:01-B1*04:02L HLA-DPA1*03:01-B1*105:01L HLA-DPA1*01:02-B1*04:01L
YANSVFNICQ

SEQ ID NO: 21249 - protein, 16 aa, Severe acute respiratory syndrome coronavirus 2
  REGION 1..16: note = Table B: HLA-DPA1*03:01-B1*04:02L HLA-DPA1*03:01-B1*105:01L
HRLYECLYRNRDVDTD

SEQ ID NO: 21250 - protein, 10 aa, Severe acute respiratory syndrome coronavirus 2
  REGION 1..10: note = Table B: HLA-DPA1*03:01-B1*04:02L HLA-DPA1*03:01-B1*105:01L HLA-DPA1*01:02-B1*04:01L
DFVNEFYAYL

SEQ ID NO: 21251 - protein, 13 aa, Severe acute respiratory syndrome coronavirus 2
  REGION 1..13: note = Table B: HLA-DPA1*03:01-B1*04:02L HLA-DRB1*11:02L
EFYAYLRKHFSMM

SEQ ID NO: 21252 - protein, 15 aa, Severe acute respiratory syndrome coronavirus 2
  REGION 1..15: note = Table B: HLA-DPA1*03:01-B1*04:02L HLA-DPA1*01:03-B1*04:02L
LRKHFSMMILSDDAV

SEQ ID NO: 21253 - protein, 16 aa, Severe acute respiratory syndrome coronavirus 2
  REGION 1..16: note = Table B: HLA-DPA1*03:01-B1*04:02L HLA-DPA1*02:01-B1*13:01L
LVKQGDDYVYLPYPDP

SEQ ID NO: 21254 - protein, 20 aa, Severe acute respiratory syndrome coronavirus 2
  REGION 1..20: note = Table B: HLA-DPA1*03:01-B1*04:02L HLA-DRB1*14:02L HLA-DRB1*12:01L
PYPDPSRILGAGCFVDDIVK

SEQ ID NO: 21255 - protein, 13 aa, Severe acute respiratory syndrome coronavirus 2
  REGION 1..13: note = Table B: HLA-DPA1*03:01-B1*04:02L HLA-DPA1*01:03-B1*04:02L HLA-DPA1*01:02-B1*04:01L
FVSLAIDAYPLTK

SEQ ID NO: 21256 - protein, 16 aa, Severe acute respiratory syndrome coronavirus 2
  REGION 1..16: note = Table B: HLA-DPA1*03:01-B1*04:02L HLA-DPA1*01:03-B1*04:02L HLA-DPA1*03:01-B1*105:01L
FHLYLQYIRKLHDELT

SEQ ID NO: 21257 - protein, 15 aa, Severe acute respiratory syndrome coronavirus 2
  REGION 1..15: note = Table B: HLA-DPA1*03:01-B1*04:02L
FNAIATCDWTNAGDY

SEQ ID NO: 21258 - protein, 16 aa, Severe acute respiratory syndrome coronavirus 2
  REGION 1..16: note = Table B: HLA-DPA1*03:01-B1*04:02L HLA-DRB1*11:02L HLA-DPA1*01:03-B1*04:02L HLA-DRB1*08:02L
TEETFKLSYGIATVRE

SEQ ID NO: 21259 - protein, 11 aa, Severe acute respiratory syndrome coronavirus 2
  REGION 1..11: note = Table B: HLA-DPA1*03:01-B1*04:02L
LSYGIATVREV

SEQ ID NO: 21260 - protein, 10 aa, Severe acute respiratory syndrome coronavirus 2
  REGION 1..10: note = Table B: HLA-DPA1*03:01-B1*04:02L HLA-DQA1*01-B1*05L HLA-DPA1*03:01-B1*105:01L HLA-DPA1*01:02-B1*04:01L HLA-DRB1*16:01L
NYVFTGYRVT

SEQ ID NO: 21261 - protein, 13 aa, Severe acute respiratory syndrome coronavirus 2
  REGION 1..13: note = Table B: HLA-DPA1*03:01-B1*04:02L HLA-DPA1*02:01-B1*13:01L HLA-DQA1*01:03-B1*06:01L
YTFEKGDYGDAVV

SEQ ID NO: 21262 - protein, 12 aa, Severe acute respiratory syndrome coronavirus 2
  REGION 1..12: note = Table B: HLA-DPA1*03:01-B1*04:02L HLA-DPA1*03:01-B1*105:01L HLA-DRB1*15:03L
YKLNVGDYFVLT

SEQ ID NO: 21263 - protein, 12 aa, Severe acute respiratory syndrome coronavirus 2
  REGION 1..12: note = Table B: HLA-DPA1*03:01-B1*04:02L HLA-DPA1*01:03-B1*04:02L HLA-DPA1*03:01-B1*105:01L
LNVGDYFVLTSH

SEQ ID NO: 21264 - protein, 12 aa, Severe acute respiratory syndrome coronavirus 2
  REGION 1..12: note = Table B: HLA-DPA1*03:01-B1*04:02L HLA-DPA1*01:03-B1*04:02L HLA-DQA1*02:01-B1*03:03L
NVGDYFVLTSHT

SEQ ID NO: 21265 - protein, 11 aa, Severe acute respiratory syndrome coronavirus 2
  REGION 1..11: note = Table B: HLA-DPA1*03:01-B1*04:02L HLA-DRB1*15:03L
FSSNVANYQKV

SEQ ID NO: 21266 - protein, 13 aa, Severe acute respiratory syndrome coronavirus 2
  REGION 1..13: note = Table B: HLA-DPA1*03:01-B1*04:02L HLA-DPA1*01:03-B1*04:02L HLA-DPA1*01:02-B1*04:01L
HFAIGLALYYPSA

SEQ ID NO: 21267 - protein, 12 aa, Severe acute respiratory syndrome coronavirus 2
  REGION 1..12: note = Table B: HLA-DPA1*03:01-B1*04:02L HLA-DPA1*03:01-B1*105:01L
KALKYLPIDKCS

SEQ ID NO: 21268 - protein, 11 aa, Severe acute respiratory syndrome coronavirus 2
  REGION 1..11: note = Table B: HLA-DPA1*03:01-B1*04:02L HLA-DPA1*03:01-B1*105:01L HLA-DPA1*01:02-B1*04:01L
TLEQYVFCTVN

SEQ ID NO: 21269 - protein, 13 aa, Severe acute respiratory syndrome coronavirus 2
  REGION 1..13: note = Table B: HLA-DPA1*03:01-B1*04:02L HLA-DPA1*03:01-B1*105:01L
LEQYVFCTVNALP

SEQ ID NO: 21270 - protein, 12 aa, Severe acute respiratory syndrome coronavirus 2
  REGION 1..12: note = Table B: HLA-DPA1*03:01-B1*04:02L HLA-DRB1*14:01L HLA-DRB1*14:17L
TADIVVFDEISM

SEQ ID NO: 21271 - protein, 14 aa, Severe acute respiratory syndrome coronavirus 2
  REGION 1..14: note = Table B: HLA-DPA1*03:01-B1*04:02L HLA-DPA1*03:01-B1*105:01L
DEISMATNYDLSVV

SEQ ID NO: 21272 - protein, 12 aa, Severe acute respiratory syndrome coronavirus 2
  REGION 1..12: note = Table B: HLA-DPA1*03:01-B1*04:02L HLA-DRB1*12:01L HLA-DPA1*03:01-B1*105:01L HLA-DPA1*01:02-B1*04:01L HLA-DRB1*16:01L HLA-DRB1*15:03L
EPEYFNSVCRLM

SEQ ID NO: 21273 - protein, 11 aa, Severe acute respiratory syndrome coronavirus 2
  REGION 1..11: note = Table B: HLA-DPA1*03:01-B1*04:02L HLA-DPA1*01:02-B1*04:01L
KTIGPDMFLGT

SEQ ID NO: 21274 - protein, 11 aa, Severe acute respiratory syndrome coronavirus 2
  REGION 1..11: note = Table B: HLA-DPA1*03:01-B1*04:02L HLA-DRB1*14:01L HLA-DPA1*02:01-B1*13:01L HLA-DPA1*03:01-B1*105:01L HLA-DRB1*08:02L HLA-DQA1*02:01-B1*03:03L
EIVDTVSALVY

SEQ ID NO: 21275 - protein, 13 aa, Severe acute respiratory syndrome coronavirus 2
  REGION 1..13: note = Table B: HLA-DPA1*03:01-B1*04:02L HLA-DRB1*11:02L HLA-DQA1*05:05-B1*03:19L
ALVYDNKLKAHKD

SEQ ID NO: 21276 - protein, 13 aa, Severe acute respiratory syndrome coronavirus 2
  REGION 1..13: note = Table B: HLA-DPA1*03:01-B1*04:02L HLA-DPA1*02:01-B1*13:01L HLA-DPA1*01:03-B1*104:01L HLA-DPA1*01:02-B1*04:01L
SPYNSQNAVASKI

SEQ ID NO: 21277 - protein, 12 aa, Severe acute respiratory syndrome coronavirus 2
  REGION 1..12: note = Table B: HLA-DPA1*03:01-B1*04:02L HLA-DPA1*01:03-B1*04:02L HLA-DPA1*03:01-B1*105:01L HLA-DPA1*01:02-B1*04:01L
EYDYVIFTQTTE

SEQ ID NO: 21278 - protein, 14 aa, Severe acute respiratory syndrome coronavirus 2
  REGION 1..14: note = Table B: HLA-DPA1*03:01-B1*04:02L HLA-DPA1*01:03-B1*04:02L HLA-DPA1*03:01-B1*105:01L HLA-DRB1*04:08L
DTKFKTEGLCVDIP

SEQ ID NO: 21279 - protein, 12 aa, Severe acute respiratory syndrome coronavirus 2
  REGION 1..12: note = Table B: HLA-DPA1*03:01-B1*04:02L HLA-DPA1*03:01-B1*105:01L HLA-DPA1*01:02-B1*04:01L HLA-DQA1*01:03-B1*06:01L
FKTEGLCVDIPG

SEQ ID NO: 21280 - protein, 16 aa, Severe acute respiratory syndrome coronavirus 2
  REGION 1..16: note = Table B: HLA-DPA1*03:01-B1*04:02L HLA-DRB1*14:02L HLA-DPA1*01:03-B1*04:02L
RRLISMMGFKMNYQVN

SEQ ID NO: 21281 - protein, 12 aa, Severe acute respiratory syndrome coronavirus 2
  REGION 1..12: note = Table B: HLA-DPA1*03:01-B1*04:02L HLA-DQA1*05:01-B1*02:01L HLA-DRB1*12:01L HLA-DPA1*03:01-B1*105:01L HLA-DPA1*01:02-B1*04:01L HLA-DRB1*16:01L HLA-DQA1*01:03-B1*06:01L HLA-DRB1*15:03L
YPNMFITREEAI

SEQ ID NO: 21282 - protein, 12 aa, Severe acute respiratory syndrome coronavirus 2
  REGION 1..12: note = Table B: HLA-DPA1*03:01-B1*04:02L HLA-DPA1*03:01-B1*105:01L HLA-DPA1*01:02-B1*04:01L
KHLIPLMYKGLP

SEQ ID NO: 21283 - protein, 10 aa, Severe acute respiratory syndrome coronavirus 2
  REGION 1..10: note = Table B: HLA-DPA1*03:01-B1*04:02L HLA-DRB1*15:03L
VFVLWAHGFE

SEQ ID NO: 21284 - protein, 10 aa, Severe acute respiratory syndrome coronavirus 2
  REGION 1..10: note = Table B: HLA-DPA1*03:01-B1*04:02L HLA-DQA1*01-B1*05L HLA-DQA1*05:01-B1*02:01L HLA-DPA1*01:03-B1*04:01L HLA-DPA1*01:03-B1*04:02L HLA-DRB1*12:01L HLA-DPA1*03:01-B1*105:01L HLA-DPA1*01:02-B1*04:01L
  REGION 1..10: note = CONT. FROM ABOVE: HLA-DRB1*16:01L HLA-DQA1*01:03-B1*06:01L HLA-D QA1*02:01-B1*03:03L HLA-DRB1*15:03L
VLWAHGFELT

SEQ ID NO: 21285 - protein, 10 aa, Severe acute respiratory syndrome coronavirus 2
  REGION 1..10: note = Table B: HLA-DPA1*03:01-B1*04:02L HLA-DPA1*03:01-B1*105:01L HLA-DPA1*01:02-B1*04:01L
LWAHGFELTS

SEQ ID NO: 21286 - protein, 13 aa, Severe acute respiratory syndrome coronavirus 2
  REGION 1..13: note = Table B: HLA-DPA1*03:01-B1*04:02L
SMKYFVKIGPERT

SEQ ID NO: 21287 - protein, 10 aa, Severe acute respiratory syndrome coronavirus 2
  REGION 1..10: note = Table B: HLA-DPA1*03:01-B1*04:02L HLA-DQA1*01-B1*05L HLA-DPA1*03:01-B1*105:01L HLA-DPA1*01:02-B1*04:01L HLA-DQA1*01:03-B1*06:01L
DYVYNPFMID

SEQ ID NO: 21288 - protein, 10 aa, Severe acute respiratory syndrome coronavirus 2
  REGION 1..10: note = Table B: HLA-DPA1*03:01-B1*04:02L HLA-DQA1*01-B1*05L HLA-DPA1*03:01-B1*105:01L HLA-DPA1*01:02-B1*04:01L HLA-DQA1*01:03-B1*06:01L
VYNPFMIDVQ

SEQ ID NO: 21289 - protein, 12 aa, Severe acute respiratory syndrome coronavirus 2
  REGION 1..12: note = Table B: HLA-DPA1*03:01-B1*04:02L HLA-DPA1*02:01-B1*13:01L
FTGNLQSNHDLY

SEQ ID NO: 21290 - protein, 13 aa, Severe acute respiratory syndrome coronavirus 2
  REGION 1..13: note = Table B: HLA-DPA1*03:01-B1*04:02L HLA-DQA1*01-B1*05L HLA-DRB1*12:01L HLA-DRB1*16:01L HLA-DRB1*15:03L
VKRVDWTIEYPII

SEQ ID NO: 21291 - protein, 16 aa, Severe acute respiratory syndrome coronavirus 2
  REGION 1..16: note = Table B: HLA-DPA1*03:01-B1*04:02L HLA-DRB1*14:02L HLA-DPA1*01:03-B1*04:02L HLA-DPA1*01:03-B1*104:01L HLA-DQA1*05:05-B1*03:01L
VQHMVVKAALLADKFP

SEQ ID NO: 21292 - protein, 12 aa, Severe acute respiratory syndrome coronavirus 2
  REGION 1..12: note = Table B: HLA-DPA1*03:01-B1*04:02L HLA-DQA1*01-B1*05L HLA-DPA1*01:02-B1*04:01L
ADVEWKFYDAQP

SEQ ID NO: 21293 - protein, 13 aa, Severe acute respiratory syndrome coronavirus 2
  REGION 1..13: note = Table B: HLA-DPA1*03:01-B1*04:02L HLA-DRB1*12:01L HLA-DPA1*01:02-B1*04:01L
SDKAYKIEELFYS

SEQ ID NO: 21294 - protein, 13 aa, Severe acute respiratory syndrome coronavirus 2
  REGION 1..13: note = Table B: HLA-DPA1*03:01-B1*04:02L
LFYSYATHSDKFT

SEQ ID NO: 21295 - protein, 19 aa, Severe acute respiratory syndrome coronavirus 2
  REGION 1..19: note = Table B: HLA-DPA1*03:01-B1*04:02L
YPANSIVCRFDTRVLSNLN

SEQ ID NO: 21296 - protein, 16 aa, Severe acute respiratory syndrome coronavirus 2
  REGION 1..16: note = Table B: HLA-DPA1*03:01-B1*04:02L HLA-DRB1*11:02L HLA-DRB1*14:02L HLA-DQA1*05:01-B1*02:01L HLA-DPA1*01:03-B1*04:02L HLA-DPA1*01:03-B1*104:01L
TRVLSNLNLPGCDGGS

SEQ ID NO: 21297 - protein, 11 aa, Severe acute respiratory syndrome coronavirus 2
  REGION 1..11: note = Table B: HLA-DPA1*03:01-B1*04:02L HLA-DPA1*01:02-B1*04:01L
VNLKQLPFFYY

SEQ ID NO: 21298 - protein, 14 aa, Severe acute respiratory syndrome coronavirus 2
  REGION 1..14: note = Table B: HLA-DPA1*03:01-B1*04:02L HLA-DPA1*01:03-B1*04:02L HLA-DPA1*01:02-B1*04:01L
NLKQLPFFYYSDSP

SEQ ID NO: 21299 - protein, 11 aa, Severe acute respiratory syndrome coronavirus 2
  REGION 1..11: note = Table B: HLA-DPA1*03:01-B1*04:02L HLA-DQA1*05:01-B1*02:01L HLA-DPA1*03:01-B1*105:01L HLA-DRB1*16:01L HLA-DQA1*01:03-B1*06:01L
DIDYVPLKSAT

SEQ ID NO: 21300 - protein, 12 aa, Severe acute respiratory syndrome coronavirus 2
  REGION 1..12: note = Table B: HLA-DPA1*03:01-B1*04:02L HLA-DRB1*14:01L HLA-DQA1*05:01-B1*02:01L
LDAYNMMISAGF

SEQ ID NO: 21301 - protein, 13 aa, Severe acute respiratory syndrome coronavirus 2
  REGION 1..13: note = Table B: HLA-DPA1*03:01-B1*04:02L HLA-DRB1*15:03L
ISAGFSLWVYKQF

SEQ ID NO: 21302 - protein, 10 aa, Severe acute respiratory syndrome coronavirus 2
  REGION 1..10: note = Table B: HLA-DPA1*03:01-B1*04:02L HLA-DPA1*03:01-B1*105:01L HLA-DPA1*01:02-B1*04:01L
NLWNTFTRLQ

SEQ ID NO: 21303 - protein, 11 aa, Severe acute respiratory syndrome coronavirus 2
  REGION 1..11: note = Table B: HLA-DPA1*03:01-B1*04:02L HLA-DPA1*01:03-B1*04:02L HLA-DPA1*03:01-B1*105:01L
WNTFTRLQSLE

SEQ ID NO: 21304 - protein, 12 aa, Severe acute respiratory syndrome coronavirus 2
  REGION 1..12: note = Table B: HLA-DPA1*03:01-B1*04:02L HLA-DQA1*05:01-B1*02:01L HLA-DPA1*01:03-B1*04:01L HLA-DRB1*12:01L HLA-DPA1*03:01-B1*105:01L HLA-DPA1*01:02-B1*04:01L HLA-DRB1*16:01L HLA-DRB1*15:03L
LQSLENVAFNVV

SEQ ID NO: 21305 - protein, 12 aa, Severe acute respiratory syndrome coronavirus 2
  REGION 1..12: note = Table B: HLA-DPA1*03:01-B1*04:02L HLA-DQA1*05:01-B1*02:01L HLA-DPA1*03:01-B1*105:01L
DGVDVELFENKT

SEQ ID NO: 21306 - protein, 11 aa, Severe acute respiratory syndrome coronavirus 2
  REGION 1..11: note = Table B: HLA-DPA1*03:01-B1*04:02L
KLEGYAFEHIV

SEQ ID NO: 21307 - protein, 12 aa, Severe acute respiratory syndrome coronavirus 2
  REGION 1..12: note = Table B: HLA-DPA1*03:01-B1*04:02L HLA-DPA1*03:01-B1*105:01L HLA-DRB1*16:01L
FEHIVYGDFSHS

SEQ ID NO: 21308 - protein, 17 aa, Severe acute respiratory syndrome coronavirus 2
  REGION 1..17: note = Table B: HLA-DPA1*03:01-B1*04:02L HLA-DQA1*05:05-B1*03:19L
LHLLIGLAKRFKESPFE

SEQ ID NO: 21309 - protein, 10 aa, Severe acute respiratory syndrome coronavirus 2
  REGION 1..10: note = Table B: HLA-DPA1*03:01-B1*04:02L HLA-DPA1*01:02-B1*04:01L
PFELEDFIPM

SEQ ID NO: 21310 - protein, 10 aa, Severe acute respiratory syndrome coronavirus 2
  REGION 1..10: note = Table B: HLA-DPA1*03:01-B1*04:02L HLA-DPA1*01:03-B1*04:01L HLA-DPA1*03:01-B1*105:01L HLA-DPA1*01:02-B1*04:01L
FELEDFIPMD

SEQ ID NO: 21311 - protein, 12 aa, Severe acute respiratory syndrome coronavirus 2
  REGION 1..12: note = Table B: HLA-DPA1*03:01-B1*04:02L
YTEISFMLWCKD

SEQ ID NO: 21312 - protein, 12 aa, Severe acute respiratory syndrome coronavirus 2
  REGION 1..12: note = Table B: HLA-DPA1*03:01-B1*04:02L HLA-DPA1*01:03-B1*04:02L HLA-DPA1*03:01-B1*105:01L
EISFMLWCKDGH

SEQ ID NO: 21313 - protein, 12 aa, Severe acute respiratory syndrome coronavirus 2
  REGION 1..12: note = Table B: HLA-DPA1*03:01-B1*04:02L
ISFMLWCKDGHV

SEQ ID NO: 21314 - protein, 12 aa, Severe acute respiratory syndrome coronavirus 2
  REGION 1..12: note = Table B: HLA-DPA1*03:01-B1*04:02L HLA-DPA1*01:03-B1*04:01L
AWQPGVAMPNLY

SEQ ID NO: 21315 - protein, 12 aa, Severe acute respiratory syndrome coronavirus 2
  REGION 1..12: note = Table B: HLA-DPA1*03:01-B1*04:02L HLA-DPA1*03:01-B1*105:01L
NVAKYTQLCQYL

SEQ ID NO: 21316 - protein, 12 aa, Severe acute respiratory syndrome coronavirus 2
  REGION 1..12: note = Table B: HLA-DPA1*03:01-B1*04:02L HLA-DPA1*03:01-B1*105:01L HLA-DPA1*01:02-B1*04:01L
VAKYTQLCQYLN

SEQ ID NO: 21317 - protein, 16 aa, Severe acute respiratory syndrome coronavirus 2
  REGION 1..16: note = Table B: HLA-DPA1*03:01-B1*04:02L HLA-DRB1*11:02L HLA-DRB1*11:01L
ADSTLIGDCATVHTAN

SEQ ID NO: 21318 - protein, 13 aa, Severe acute respiratory syndrome coronavirus 2
  REGION 1..13: note = Table B: HLA-DPA1*03:01-B1*04:02L HLA-DRB1*12:01L HLA-DPA1*03:01-B1*105:01L
TANKWDLIISDMY

SEQ ID NO: 21319 - protein, 10 aa, Severe acute respiratory syndrome coronavirus 2
  REGION 1..10: note = Table B: HLA-DPA1*03:01-B1*04:02L HLA-DPA1*01:03-B1*04:01L HLA-DPA1*03:01-B1*105:01L HLA-DPA1*01:02-B1*04:01L HLA-DQA1*01:03-B1*06:01L
SWNADLYKLM

SEQ ID NO: 21320 - protein, 10 aa, Severe acute respiratory syndrome coronavirus 2
  REGION 1..10: note = Table B: HLA-DPA1*03:01-B1*04:02L HLA-DPA1*03:01-B1*105:01L HLA-DPA1*01:02-B1*04:01L HLA-DQA1*01:03-B1*06:01L
WNADLYKLMG

SEQ ID NO: 21321 - protein, 11 aa, Severe acute respiratory syndrome coronavirus 2
  REGION 1..11: note = Table B: HLA-DPA1*03:01-B1*04:02L HLA-DQA1*05:05-B1*03:19L HLA-DRB1*12:01L HLA-DPA1*03:01-B1*105:01L HLA-DQA1*02:01-B1*03:03L HLA-DRB1*15:03L
DLYKLMGHFAW

SEQ ID NO: 21322 - protein, 11 aa, Severe acute respiratory syndrome coronavirus 2
  REGION 1..11: note = Table B: HLA-DPA1*03:01-B1*04:02L HLA-DQA1*05:05-B1*03:19L HLA-DQA1*05:01-B1*02:01L HLA-DPA1*01:03-B1*04:01L HLA-DRB1*12:01L HLA-DPA1*02:01-B1*13:01L HLA-DQA1*01:03-B1*06:01L HLA-DQA1*02:01-B1*03:03L
  REGION 1..11: note = CONT. FROM ABOVE: HLA-DRB1*15:03L
NPIQLSSYSLF

SEQ ID NO: 21323 - protein, 12 aa, Severe acute respiratory syndrome coronavirus 2
  REGION 1..12: note = Table B: HLA-DPA1*03:01-B1*04:02L HLA-DQA1*05:01-B1*02:01L HLA-DRB1*16:01L HLA-DRB1*15:03L
SSYSLFDMSKFP

SEQ ID NO: 21324 - protein, 12 aa, Severe acute respiratory syndrome coronavirus 2
  REGION 1..12: note = Table B: HLA-DPA1*03:01-B1*04:02L HLA-DPA1*02:01-B1*13:01L
SFTRGVYYPDKV

SEQ ID NO: 21325 - protein, 13 aa, Severe acute respiratory syndrome coronavirus 2
  REGION 1..13: note = Table B: HLA-DPA1*03:01-B1*04:02L
HSTQDLFLPFFSN

SEQ ID NO: 21326 - protein, 13 aa, Severe acute respiratory syndrome coronavirus 2
  REGION 1..13: note = Table B: HLA-DPA1*03:01-B1*04:02L
ATNVVIKVCEFQF

SEQ ID NO: 21327 - protein, 12 aa, Severe acute respiratory syndrome coronavirus 2
  REGION 1..12: note = Table B: HLA-DPA1*03:01-B1*04:02L
NVVIKVCEFQFC

SEQ ID NO: 21328 - protein, 12 aa, Severe acute respiratory syndrome coronavirus 2
  REGION 1..12: note = Table B: HLA-DPA1*03:01-B1*04:02L HLA-DPA1*01:03-B1*04:02L HLA-DPA1*03:01-B1*105:01L
VVIKVCEFQFCN

SEQ ID NO: 21329 - protein, 12 aa, Severe acute respiratory syndrome coronavirus 2
  REGION 1..12: note = Table B: HLA-DPA1*03:01-B1*04:02L HLA-DPA1*03:01-B1*105:01L
IKVCEFQFCNDP

SEQ ID NO: 21330 - protein, 11 aa, Severe acute respiratory syndrome coronavirus 2
  REGION 1..11: note = Table B: HLA-DPA1*03:01-B1*04:02L HLA-DPA1*01:03-B1*04:02L HLA-DPA1*03:01-B1*105:01L HLA-DRB1*16:01L HLA-DRB1*04:08L
PFLGVYYHKNN

SEQ ID NO: 21331 - protein, 10 aa, Severe acute respiratory syndrome coronavirus 2
  REGION 1..10: note = Table B: HLA-DPA1*03:01-B1*04:02L HLA-DPA1*03:01-B1*105:01L HLA-DPA1*01:02-B1*04:01L
WMESEFRVYS

SEQ ID NO: 21332 - protein, 13 aa, Severe acute respiratory syndrome coronavirus 2
  REGION 1..13: note = Table B: HLA-DPA1*03:01-B1*04:02L
EFRVYSSANNCTF

SEQ ID NO: 21333 - protein, 10 aa, Severe acute respiratory syndrome coronavirus 2
  REGION 1..10: note = Table B: HLA-DPA1*03:01-B1*04:02L HLA-DQA1*01-B1*05L HLA-DPA1*01:03-B1*04:01L HLA-DPA1*03:01-B1*105:01L HLA-DPA1*01:02-B1*04:01L HLA-DQA1*01:03-B1*06:01L
EYVSQPFLMD

SEQ ID NO: 21334 - protein, 12 aa, Severe acute respiratory syndrome coronavirus 2
  REGION 1..12: note = Table B: HLA-DPA1*03:01-B1*04:02L HLA-DPA1*03:01-B1*105:01L HLA-DPA1*01:02-B1*04:01L HLA-DQA1*01:03-B1*06:01L
VSQPFLMDLEGK

SEQ ID NO: 21335 - protein, 13 aa, Severe acute respiratory syndrome coronavirus 2
  REGION 1..13: note = Table B: HLA-DPA1*03:01-B1*04:02L HLA-DRB1*11:02L HLA-DRB1*11:03L HLA-DRB1*14:02L HLA-DQA1*05:05-B1*03:19L HLA-DQA1*05:05-B1*03:116L HLA-DPA1*01:03-B1*04:02L HLA-DPA1*01:03-B1*02:01L HLA-DQA1*05:05-B1*03:01L
  REGION 1..13: note = CONT. FROM ABOVE: HLA-DRB1*08:02L
GYFKIYSKHTPIN

SEQ ID NO: 21336 - protein, 13 aa, Severe acute respiratory syndrome coronavirus 2
  REGION 1..13: note = Table B: HLA-DPA1*03:01-B1*04:02L
PINLVRDLPQGFS

SEQ ID NO: 21337 - protein, 12 aa, Severe acute respiratory syndrome coronavirus 2
  REGION 1..12: note = Table B: HLA-DPA1*03:01-B1*04:02L HLA-DQA1*01-B1*05L HLA-DPA1*01:03-B1*04:02L HLA-DPA1*02:01-B1*13:01L
NITRFQTLLALH

SEQ ID NO: 21338 - protein, 14 aa, Severe acute respiratory syndrome coronavirus 2
  REGION 1..14: note = Table B: HLA-DPA1*03:01-B1*04:02L HLA-DRB1*10:01L
ITRFQTLLALHRSY

SEQ ID NO: 21339 - protein, 16 aa, Severe acute respiratory syndrome coronavirus 2
  REGION 1..16: note = Table B: HLA-DPA1*03:01-B1*04:02L
FQTLLALHRSYLTPGD

SEQ ID NO: 21340 - protein, 15 aa, Severe acute respiratory syndrome coronavirus 2
  REGION 1..15: note = Table B: HLA-DPA1*03:01-B1*04:02L HLA-DRB1*14:02L HLA-DQA1*05:05-B1*03:19L HLA-DPA1*01:03-B1*04:02L
TLLALHRSYLTPGDS

SEQ ID NO: 21341 - protein, 13 aa, Severe acute respiratory syndrome coronavirus 2
  REGION 1..13: note = Table B: HLA-DPA1*03:01-B1*04:02L HLA-DPA1*01:03-B1*04:02L HLA-DQA1*03:01-B1*03:02L
SSSGWTAGAAAYY

SEQ ID NO: 21342 - protein, 14 aa, Severe acute respiratory syndrome coronavirus 2
  REGION 1..14: note = Table B: HLA-DPA1*03:01-B1*04:02L HLA-DRB1*09:01L HLA-DPA1*01:03-B1*104:01L
FRVQPTESIVRFPN

SEQ ID NO: 21343 - protein, 14 aa, Severe acute respiratory syndrome coronavirus 2
  REGION 1..14: note = Table B: HLA-DPA1*03:01-B1*04:02L HLA-DRB1*11:02L HLA-DRB1*08:01L HLA-DRB5*01:01L HLA-DRB4*01:01L HLA-DPA1*01:03-B1*04:02L HLA-DRB3*01:01L HLA-DPA1*02:01-B1*13:01L HLA-DPA1*01:03-B1*104:01L
  REGION 1..14: note = CONT. FROM ABOVE: HLA-DRB1*08:02L HLA-DRB1*15:01L
STEIYQAGSTPCNG

SEQ ID NO: 21344 - protein, 12 aa, Severe acute respiratory syndrome coronavirus 2
  REGION 1..12: note = Table B: HLA-DPA1*03:01-B1*04:02L HLA-DRB1*14:01L HLA-DRB1*12:01L HLA-DRB1*16:01L
YQPYRVVVLSFE

SEQ ID NO: 21345 - protein, 13 aa, Severe acute respiratory syndrome coronavirus 2
  REGION 1..13: note = Table B: HLA-DPA1*03:01-B1*04:02L
QPYRVVVLSFELL

SEQ ID NO: 21346 - protein, 12 aa, Severe acute respiratory syndrome coronavirus 2
  REGION 1..12: note = Table B: HLA-DPA1*03:01-B1*04:02L HLA-DPA1*03:01-B1*105:01L HLA-DPA1*01:02-B1*04:01L
VVLSFELLHAPA

SEQ ID NO: 21347 - protein, 15 aa, Severe acute respiratory syndrome coronavirus 2
  REGION 1..15: note = Table B: HLA-DPA1*03:01-B1*04:02L HLA-DRB1*03:01L HLA-DRB1*11:02L HLA-DRB1*08:01L HLA-DPA1*01:03-B1*104:01L HLA-DQA1*01:03-B1*06:01L HLA-DRB1*08:02L
ENSVAYSNNSIAIPT

SEQ ID NO: 21348 - protein, 12 aa, Severe acute respiratory syndrome coronavirus 2
  REGION 1..12: note = Table B: HLA-DPA1*03:01-B1*04:02L HLA-DPA1*03:01-B1*105:01L
LLLQYGSFCTQL

SEQ ID NO: 21349 - protein, 16 aa, Severe acute respiratory syndrome coronavirus 2
  REGION 1..16: note = Table B: HLA-DPA1*03:01-B1*04:02L HLA-DPA1*01:03-B1*04:02L HLA-DPA1*01:03-B1*104:01L
KQIYKTPPIKDFGGFN

SEQ ID NO: 21350 - protein, 11 aa, Severe acute respiratory syndrome coronavirus 2
  REGION 1..11: note = Table B: HLA-DPA1*03:01-B1*04:02L HLA-DPA1*03:01-B1*105:01L HLA-DPA1*01:02-B1*04:01L
DLICAQKFNGL

SEQ ID NO: 21351 - protein, 11 aa, Severe acute respiratory syndrome coronavirus 2
  REGION 1..11: note = Table B: HLA-DPA1*03:01-B1*04:02L HLA-DPA1*03:01-B1*105:01L
LICAQKFNGLT

SEQ ID NO: 21352 - protein, 16 aa, Severe acute respiratory syndrome coronavirus 2
  REGION 1..16: note = Table B: HLA-DPA1*03:01-B1*04:02L HLA-DRB1*14:02L
SGWTFGAGAALQIPFA

SEQ ID NO: 21353 - protein, 13 aa, Severe acute respiratory syndrome coronavirus 2
  REGION 1..13: note = Table B: HLA-DPA1*03:01-B1*04:02L HLA-DRB1*12:01L HLA-DRB1*14:54L HLA-DRB1*14:17L
TQNVLYENQKLIA

SEQ ID NO: 21354 - protein, 12 aa, Severe acute respiratory syndrome coronavirus 2
  REGION 1..12: note = Table B: HLA-DPA1*03:01-B1*04:02L
SANLAATKMSEC

SEQ ID NO: 21355 - protein, 11 aa, Severe acute respiratory syndrome coronavirus 2
  REGION 1..11: note = Table B: HLA-DPA1*03:01-B1*04:02L HLA-DPA1*03:01-B1*105:01L
VFLHVTYVPAQ

SEQ ID NO: 21356 - protein, 16 aa, Severe acute respiratory syndrome coronavirus 2
  REGION 1..16: note = Table B: HLA-DPA1*03:01-B1*04:02L
AQEKNFTTAPAICHDG

SEQ ID NO: 21357 - protein, 12 aa, Severe acute respiratory syndrome coronavirus 2
  REGION 1..12: note = Table B: HLA-DPA1*03:01-B1*04:02L HLA-DPA1*02:01-B1*13:01L
WFVTQRNFYEPQ

SEQ ID NO: 21358 - protein, 13 aa, Severe acute respiratory syndrome coronavirus 2
  REGION 1..13: note = Table B: HLA-DPA1*03:01-B1*04:02L HLA-DQA1*01:03-B1*06:01L
FVTQRNFYEPQII

SEQ ID NO: 21359 - protein, 13 aa, Severe acute respiratory syndrome coronavirus 2
  REGION 1..13: note = Table B: HLA-DPA1*03:01-B1*04:02L
NASVVNIQKEIDR

SEQ ID NO: 21360 - protein, 14 aa, Severe acute respiratory syndrome coronavirus 2
  REGION 1..14: note = Table B: HLA-DPA1*03:01-B1*04:02L
ASVVNIQKEIDRLN

SEQ ID NO: 21361 - protein, 14 aa, Severe acute respiratory syndrome coronavirus 2
  REGION 1..14: note = Table B: HLA-DPA1*03:01-B1*04:02L HLA-DRB1*11:02L HLA-DRB1*14:02L HLA-DQA1*05:05-B1*03:19L HLA-DQA1*05:05-B1*03:116L HLA-DPA1*01:03-B1*04:02L HLA-DPA1*01:03-B1*02:01L HLA-DQA1*05:05-B1*03:01L
  REGION 1..14: note = CONT. FROM ABOVE: HLA-DRB1*07:01L HLA-DRB1*10:01L HLA-DRB1*08:02 L
IDRLNEVAKNLNES

SEQ ID NO: 21362 - protein, 13 aa, Severe acute respiratory syndrome coronavirus 2
  REGION 1..13: note = Table B: HLA-DPA1*03:01-B1*04:02L HLA-DPA1*03:01-B1*105:01L
EQYIKWPWYIWLG

SEQ ID NO: 21363 - protein, 16 aa, Severe acute respiratory syndrome coronavirus 2
  REGION 1..16: note = Table B: HLA-DPA1*03:01-B1*04:02L HLA-DRB1*03:01L
ASKIITLKKRWQLALS

SEQ ID NO: 21364 - protein, 10 aa, Severe acute respiratory syndrome coronavirus 2
  REGION 1..10: note = Table B: HLA-DPA1*03:01-B1*04:02L HLA-DPA1*03:01-B1*105:01L HLA-DPA1*01:02-B1*04:01L HLA-DRB1*15:03L
LLFVTVYSHL

SEQ ID NO: 21365 - protein, 10 aa, Severe acute respiratory syndrome coronavirus 2
  REGION 1..10: note = Table B: HLA-DPA1*03:01-B1*04:02L HLA-DQA1*05:01-B1*02:01L HLA-DPA1*01:03-B1*04:01L HLA-DRB1*12:01L HLA-DPA1*03:01-B1*105:01L HLA-DPA1*01:02-B1*04:01L HLA-DRB1*16:01L HLA-DQA1*01:03-B1*06:01L
  REGION 1..10: note = CONT. FROM ABOVE: HLA-DQA1*02:01-B1*03:03L HLA-DRB1*15:03L
LFVTVYSHLL

SEQ ID NO: 21366 - protein, 10 aa, Severe acute respiratory syndrome coronavirus 2
  REGION 1..10: note = Table B: HLA-DPA1*03:01-B1*04:02L HLA-DPA1*01:03-B1*04:02L HLA-DPA1*03:01-B1*105:01L HLA-DPA1*01:02-B1*04:01L HLA-DQA1*01:03-B1*06:01L
VYSHLLLVAA

SEQ ID NO: 21367 - protein, 11 aa, Severe acute respiratory syndrome coronavirus 2
  REGION 1..11: note = Table B: HLA-DPA1*03:01-B1*04:02L HLA-DPA1*03:01-B1*105:01L HLA-DPA1*01:02-B1*04:01L
YALVYFLQSIN

SEQ ID NO: 21368 - protein, 10 aa, Severe acute respiratory syndrome coronavirus 2
  REGION 1..10: note = Table B: HLA-DPA1*03:01-B1*04:02L HLA-DPA1*01:02-B1*04:01L
YDANYFLCWH

SEQ ID NO: 21369 - protein, 13 aa, Severe acute respiratory syndrome coronavirus 2
  REGION 1..13: note = Table B: HLA-DPA1*03:01-B1*04:02L HLA-DRB1*14:01L HLA-DRB1*12:01L HLA-DPA1*01:02-B1*04:01L
DTGVEHVTFFIYN

SEQ ID NO: 21370 - protein, 13 aa, Severe acute respiratory syndrome coronavirus 2
  REGION 1..13: note = Table B: HLA-DPA1*03:01-B1*04:02L HLA-DPA1*03:01-B1*105:01L HLA-DPA1*01:02-B1*04:01L
VEHVTFFIYNKIV

SEQ ID NO: 21371 - protein, 12 aa, Severe acute respiratory syndrome coronavirus 2
  REGION 1..12: note = Table B: HLA-DPA1*03:01-B1*04:02L HLA-DPA1*03:01-B1*105:01L HLA-DPA1*01:02-B1*04:01L HLA-DRB1*15:03L
HVTFFIYNKIVD

SEQ ID NO: 21372 - protein, 10 aa, Severe acute respiratory syndrome coronavirus 2
  REGION 1..10: note = Table B: HLA-DPA1*03:01-B1*04:02L HLA-DQA1*01-B1*05L HLA-DPA1*03:01-B1*105:01L HLA-DPA1*01:02-B1*04:01L HLA-DQA1*01:03-B1*06:01L
FIYNKIVDEP

SEQ ID NO: 21373 - protein, 11 aa, Severe acute respiratory syndrome coronavirus 2
  REGION 1..11: note = Table B: HLA-DPA1*03:01-B1*04:02L
GVVNPVMEPIY

SEQ ID NO: 21374 - protein, 11 aa, Severe acute respiratory syndrome coronavirus 2
  REGION 1..11: note = Table B: HLA-DPA1*03:01-B1*04:02L HLA-DQA1*05:05-B1*03:116L HLA-DQA1*03:01-B1*03:02L HLA-DPA1*01:03-B1*104:01L HLA-DPA1*01:02-B1*04:01L
EETGTLIVNSV

SEQ ID NO: 21375 - protein, 11 aa, Severe acute respiratory syndrome coronavirus 2
  REGION 1..11: note = Table B: HLA-DPA1*03:01-B1*04:02L HLA-DQA1*05:01-B1*02:01L HLA-DRB1*12:01L
GTLIVNSVLLF

SEQ ID NO: 21376 - protein, 11 aa, Severe acute respiratory syndrome coronavirus 2
  REGION 1..11: note = Table B: HLA-DPA1*03:01-B1*04:02L HLA-DRB1*12:01L HLA-DPA1*03:01-B1*105:01L
AILTALRLCAY

SEQ ID NO: 21377 - protein, 11 aa, Severe acute respiratory syndrome coronavirus 2
  REGION 1..11: note = Table B: HLA-DPA1*03:01-B1*04:02L
MWLSYFIASFR

SEQ ID NO: 21378 - protein, 11 aa, Severe acute respiratory syndrome coronavirus 2
  REGION 1..11: note = Table B: HLA-DPA1*03:01-B1*04:02L HLA-DPA1*03:01-B1*105:01L HLA-DQA1*01:03-B1*06:01L HLA-DRB1*04:08L
TILTRPLLESE

SEQ ID NO: 21379 - protein, 13 aa, Severe acute respiratory syndrome coronavirus 2
  REGION 1..13: note = Table B: HLA-DPA1*03:01-B1*04:02L HLA-DPA1*02:01-B1*13:01L
YYKLGASQRVAGD

SEQ ID NO: 21380 - protein, 13 aa, Severe acute respiratory syndrome coronavirus 2
  REGION 1..13: note = Table B: HLA-DPA1*03:01-B1*04:02L HLA-DRB1*14:02L HLA-DPA1*01:03-B1*04:01L HLA-DPA1*01:03-B1*04:02L HLA-DPA1*01:02-B1*04:01L
VAGDSGFAAYSRY

SEQ ID NO: 21381 - protein, 15 aa, Severe acute respiratory syndrome coronavirus 2
  REGION 1..15: note = Table B: HLA-DPA1*03:01-B1*04:02L
SRYRIGNYKLNTDHS

SEQ ID NO: 21382 - protein, 12 aa, Severe acute respiratory syndrome coronavirus 2
  REGION 1..12: note = Table B: HLA-DPA1*03:01-B1*04:02L HLA-DQA1*05:01-B1*02:01L HLA-DPA1*01:03-B1*04:01L HLA-DPA1*03:01-B1*105:01L HLA-DRB1*15:03L
VSIWNLDYIINL

SEQ ID NO: 21383 - protein, 12 aa, Severe acute respiratory syndrome coronavirus 2
  REGION 1..12: note = Table B: HLA-DPA1*03:01-B1*04:02L HLA-DPA1*03:01-B1*105:01L HLA-DRB1*15:03L
WNLDYIINLIIK

SEQ ID NO: 21384 - protein, 12 aa, Severe acute respiratory syndrome coronavirus 2
  REGION 1..12: note = Table B: HLA-DPA1*03:01-B1*04:02L
VQELYSPIFLIV

SEQ ID NO: 21385 - protein, 11 aa, Severe acute respiratory syndrome coronavirus 2
  REGION 1..11: note = Table B: HLA-DPA1*03:01-B1*04:02L
ELYSPIFLIVA

SEQ ID NO: 21386 - protein, 12 aa, Severe acute respiratory syndrome coronavirus 2
  REGION 1..12: note = Table B: HLA-DPA1*03:01-B1*04:02L HLA-DQA1*01-B1*05L HLA-DPA1*01:03-B1*04:02L
IFWFSLELQDHN

SEQ ID NO: 21387 - protein, 12 aa, Severe acute respiratory syndrome coronavirus 2
  REGION 1..12: note = Table B: HLA-DPA1*03:01-B1*04:02L HLA-DPA1*01:03-B1*04:02L HLA-DPA1*01:02-B1*04:01L
FWFSLELQDHNE

SEQ ID NO: 21388 - protein, 10 aa, Severe acute respiratory syndrome coronavirus 2
  REGION 1..10: note = Table B: HLA-DPA1*03:01-B1*04:02L HLA-DPA1*01:03-B1*04:01L HLA-DPA1*01:03-B1*04:02L HLA-DPA1*03:01-B1*105:01L HLA-DPA1*01:02-B1*04:01L HLA-DRB1*16:01L HLA-DRB1*04:08L
FYSKWYIRVG

SEQ ID NO: 21389 - protein, 16 aa, Severe acute respiratory syndrome coronavirus 2
  REGION 1..16: note = Table B: HLA-DPA1*03:01-B1*04:02L HLA-DPA1*01:03-B1*104:01L HLA-DRB1*15:01L
YSKWYIRVGARKSAPL

SEQ ID NO: 21390 - protein, 13 aa, Severe acute respiratory syndrome coronavirus 2
  REGION 1..13: note = Table B: HLA-DPA1*03:01-B1*04:02L HLA-DPA1*03:01-B1*105:01L
GSLVVRCSFYEDF

SEQ ID NO: 21391 - protein, 12 aa, Severe acute respiratory syndrome coronavirus 2
  REGION 1..12: note = Table B: HLA-DPA1*03:01-B1*04:02L HLA-DPA1*03:01-B1*105:01L
LVVRCSFYEDFL

SEQ ID NO: 21392 - protein, 10 aa, Severe acute respiratory syndrome coronavirus 2
  REGION 1..10: note = Table B: HLA-DPA1*03:01-B1*04:02L HLA-DQA1*01-B1*05L HLA-DPA1*01:03-B1*04:01L HLA-DPA1*01:03-B1*04:02L HLA-DPA1*03:01-B1*105:01L HLA-DPA1*01:02-B1*04:01L HLA-DRB1*16:01L HLA-DQA1*01:03-B1*06:01L HLA-DRB1*04:08L
SFYEDFLEYH

SEQ ID NO: 21393 - protein, 15 aa, Severe acute respiratory syndrome coronavirus 2
  REGION 1..15: note = Table B: HLA-DPA1*03:01-B1*04:02L HLA-DQA1*01-B1*05L HLA-DPA1*01:02-B1*04:01L
GANKDGIIWVATEGA

SEQ ID NO: 21394 - protein, 10 aa, Severe acute respiratory syndrome coronavirus 2
  REGION 1..10: note = Table B: HLA-DPA1*03:01-B1*04:02L
ALALLLLDRL

SEQ ID NO: 21395 - protein, 16 aa, Severe acute respiratory syndrome coronavirus 2
  REGION 1..16: note = Table B: HLA-DPA1*03:01-B1*04:02L HLA-DPA1*01:03-B1*04:02L
ELIRQGTDYKHWPQIA

SEQ ID NO: 21396 - protein, 13 aa, Severe acute respiratory syndrome coronavirus 2
  REGION 1..13: note = Table B: HLA-DPA1*03:01-B1*04:02L HLA-DPA1*03:01-B1*105:01L
GTDYKHWPQIAQF

SEQ ID NO: 21397 - protein, 11 aa, Severe acute respiratory syndrome coronavirus 2
  REGION 1..11: note = Table B: HLA-DPA1*03:01-B1*04:02L HLA-DRB1*11:02L
VILLNKHIDAY

SEQ ID NO: 21398 - protein, 13 aa, Severe acute respiratory syndrome coronavirus 2
  REGION 1..13: note = Table B: HLA-DPA1*03:01-B1*04:02L
TVTLLPAADLDDF

SEQ ID NO: 21399 - protein, 10 aa, Severe acute respiratory syndrome coronavirus 2
  REGION 1..10: note = Table B: HLA-DPA1*03:01-B1*04:02L HLA-DPA1*03:01-B1*105:01L HLA-DQA1*01:03-B1*06:01L HLA-DRB1*15:03L
AFPFTIYSLL

SEQ ID NO: 21400 - protein, 11 aa, Severe acute respiratory syndrome coronavirus 2
  REGION 1..11: note = Table B: HLA-DPA1*03:01-B1*04:02L HLA-DPA1*01:02-B1*04:01L
PFTIYSLLLCR

SEQ ID NO: 21401 - protein, 11 aa, Severe acute respiratory syndrome coronavirus 2
  REGION 1..11: note = Table B: HLA-DPA1*03:01-B1*04:02L HLA-DPA1*03:01-B1*105:01L HLA-DPA1*01:02-B1*04:01L
TIYSLLLCRMN

SEQ ID NO: 21402 - protein, 16 aa, Severe acute respiratory syndrome coronavirus 2
  REGION 1..16: note = Table B: HLA-DRB1*03:01L
EIPVAYRKVLLRKNGN

SEQ ID NO: 21403 - protein, 18 aa, Severe acute respiratory syndrome coronavirus 2
  REGION 1..18: note = Table B: HLA-DRB1*03:01L HLA-DRB1*11:02L HLA-DRB1*11:03L HLA-DRB1*14:02L HLA-DQA1*05:05-B1*03:19L HLA-DQA1*05:01-B1*02:01L HLA-DRB4*01:01L HLA-DPA1*01:03-B1*04:01L HLA-DRB1*09:01L HLA-DRB1*08:02L
GPDGYPLECIKDLLARAG

SEQ ID NO: 21404 - protein, 15 aa, Severe acute respiratory syndrome coronavirus 2
  REGION 1..15: note = Table B: HLA-DRB1*03:01L
FPLNSIIKTIQPRVE

SEQ ID NO: 21405 - protein, 16 aa, Severe acute respiratory syndrome coronavirus 2
  REGION 1..16: note = Table B: HLA-DRB1*03:01L HLA-DPA1*02:01-B1*13:01L
IIKTIQPRVEKKKLDG

SEQ ID NO: 21406 - protein, 17 aa, Severe acute respiratory syndrome coronavirus 2
  REGION 1..17: note = Table B: HLA-DRB1*03:01L
VFSYVGCHNKCAYWVPR

SEQ ID NO: 21407 - protein, 15 aa, Severe acute respiratory syndrome coronavirus 2
  REGION 1..15: note = Table B: HLA-DRB1*03:01L HLA-DRB1*13:01L HLA-DPA1*01:03-B1*104:01L
DNLLEILQKEKVNIN

SEQ ID NO: 21408 - protein, 14 aa, Severe acute respiratory syndrome coronavirus 2
  REGION 1..14: note = Table B: HLA-DRB1*03:01L HLA-DRB1*11:02L HLA-DRB4*01:01L HLA-DQA1*05:05-B1*03:116L HLA-DPA1*01:03-B1*02:01L HLA-DRB1*08:02L
SPLYAFASEAARVV

SEQ ID NO: 21409 - protein, 12 aa, Severe acute respiratory syndrome coronavirus 2
  REGION 1..12: note = Table B: HLA-DRB1*03:01L HLA-DPA1*01:03-B1*104:01L
YAFASEAARVVR

SEQ ID NO: 21410 - protein, 13 aa, Severe acute respiratory syndrome coronavirus 2
  REGION 1..13: note = Table B: HLA-DRB1*03:01L HLA-DRB1*11:03L
FSRTLETAQNSVR

SEQ ID NO: 21411 - protein, 15 aa, Severe acute respiratory syndrome coronavirus 2
  REGION 1..15: note = Table B: HLA-DRB1*03:01L HLA-DRB1*11:02L
VGGQIVTCAKEIKES

SEQ ID NO: 21412 - protein, 16 aa, Severe acute respiratory syndrome coronavirus 2
  REGION 1..16: note = Table B: HLA-DRB1*03:01L HLA-DRB4*01:01L HLA-DRB1*09:01L
APTKVTFGDDTVIEVQ

SEQ ID NO: 21413 - protein, 15 aa, Severe acute respiratory syndrome coronavirus 2
  REGION 1..15: note = Table B: HLA-DRB1*03:01L HLA-DRB1*11:01L
VQPQLEMELTPVVQT

SEQ ID NO: 21414 - protein, 14 aa, Severe acute respiratory syndrome coronavirus 2
  REGION 1..14: note = Table B: HLA-DRB1*03:01L
TDNVYIKNADIVEE

SEQ ID NO: 21415 - protein, 14 aa, Severe acute respiratory syndrome coronavirus 2
  REGION 1..14: note = Table B: HLA-DRB1*03:01L HLA-DRB1*11:02L HLA-DRB1*13:01L HLA-DQA1*05:05-B1*03:116L HLA-DRB1*15:01L
DNVYIKNADIVEEA

SEQ ID NO: 21416 - protein, 14 aa, Severe acute respiratory syndrome coronavirus 2
  REGION 1..14: note = Table B: HLA-DRB1*03:01L HLA-DRB1*14:02L HLA-DRB1*13:01L HLA-DPA1*03:01-B1*105:01L HLA-DPA1*01:03-B1*02:01L
NADIVEEAKKVKPT

SEQ ID NO: 21417 - protein, 12 aa, Severe acute respiratory syndrome coronavirus 2
  REGION 1..12: note = Table B: HLA-DRB1*03:01L HLA-DRB4*02:01NL HLA-DRB1*13:01L HLA-DRB4*01:01L
SDDYIATNGPLK

SEQ ID NO: 21418 - protein, 14 aa, Severe acute respiratory syndrome coronavirus 2
  REGION 1..14: note = Table B: HLA-DRB1*03:01L HLA-DPA1*01:03-B1*04:02L HLA-DRB1*07:01L HLA-DRB1*08:02L
SFLEMKSEKQVEQK

SEQ ID NO: 21419 - protein, 14 aa, Severe acute respiratory syndrome coronavirus 2
  REGION 1..14: note = Table B: HLA-DRB1*03:01L HLA-DRB1*11:02L HLA-DQA1*01:01-B1*05:01L HLA-DRB1*04:10L
VTTTLEETKFLTEN

SEQ ID NO: 21420 - protein, 13 aa, Severe acute respiratory syndrome coronavirus 2
  REGION 1..13: note = Table B: HLA-DRB1*03:01L HLA-DQA1*05:05-B1*03:19L
LLYIDINGNLHPD

SEQ ID NO: 21421 - protein, 13 aa, Severe acute respiratory syndrome coronavirus 2
  REGION 1..13: note = Table B: HLA-DRB1*03:01L
NGYTVEEAKTVLK

SEQ ID NO: 21422 - protein, 14 aa, Severe acute respiratory syndrome coronavirus 2
  REGION 1..14: note = Table B: HLA-DRB1*03:01L HLA-DRB1*11:02L HLA-DRB1*15:01L
KSAFYILPSIISNE

SEQ ID NO: 21423 - protein, 14 aa, Severe acute respiratory syndrome coronavirus 2
  REGION 1..14: note = Table B: HLA-DRB1*03:01L HLA-DRB1*11:02L HLA-DRB1*13:01L HLA-DPA1*01:03-B1*04:01L HLA-DQA1*05:05-B1*03:116L HLA-DRB1*15:01L
SAFYILPSIISNEK

SEQ ID NO: 21424 - protein, 14 aa, Severe acute respiratory syndrome coronavirus 2
  REGION 1..14: note = Table B: HLA-DRB1*03:01L HLA-DQA1*01:01-B1*05:01L HLA-DRB1*11:01L HLA-DRB5*01:01L HLA-DPA1*01:03-B1*04:02L
EKQEILGTVSWNLR

SEQ ID NO: 21425 - protein, 14 aa, Severe acute respiratory syndrome coronavirus 2
  REGION 1..14: note = Table B: HLA-DRB1*03:01L
LREMLAHAEETRKL

SEQ ID NO: 21426 - protein, 16 aa, Severe acute respiratory syndrome coronavirus 2
  REGION 1..16: note = Table B: HLA-DRB1*03:01L
REMLAHAEETRKLMPV

SEQ ID NO: 21427 - protein, 16 aa, Severe acute respiratory syndrome coronavirus 2
  REGION 1..16: note = Table B: HLA-DRB1*03:01L HLA-DRB1*11:01L
VSTIQRKYKGIKIQEG

SEQ ID NO: 21428 - protein, 16 aa, Severe acute respiratory syndrome coronavirus 2
  REGION 1..16: note = Table B: HLA-DRB1*03:01L HLA-DRB1*11:02L HLA-DRB3*01:01L HLA-DPA1*01:03-B1*02:01L HLA-DPA1*01:03-B1*104:01L HLA-DRB1*08:02L HLA-DRB1*15:01L
VTAYNGYLTSSSKTPE

SEQ ID NO: 21429 - protein, 14 aa, Severe acute respiratory syndrome coronavirus 2
  REGION 1..14: note = Table B: HLA-DRB1*03:01L HLA-DRB1*11:02L HLA-DRB4*01:01L
NGYLTSSSKTPEEH

SEQ ID NO: 21430 - protein, 17 aa, Severe acute respiratory syndrome coronavirus 2
  REGION 1..17: note = Table B: HLA-DRB1*03:01L
TPEEHFIETISLAGSYK

SEQ ID NO: 21431 - protein, 14 aa, Severe acute respiratory syndrome coronavirus 2
  REGION 1..14: note = Table B: HLA-DRB1*03:01L HLA-DRB1*11:02L HLA-DRB3*01:01L
VYYTSNPTTFHLDG

SEQ ID NO: 21432 - protein, 13 aa, Severe acute respiratory syndrome coronavirus 2
  REGION 1..13: note = Table B: HLA-DRB1*03:01L HLA-DRB1*11:01L HLA-DRB3*01:01L HLA-DPA1*01:03-B1*02:01L HLA-DPA1*01:03-B1*104:01L
IKVFTTVDNINLH

SEQ ID NO: 21433 - protein, 14 aa, Severe acute respiratory syndrome coronavirus 2
  REGION 1..14: note = Table B: HLA-DRB1*03:01L HLA-DRB1*11:02L HLA-DRB4*01:01L HLA-DPA1*01:03-B1*02:01L HLA-DRB1*08:02L HLA-DRB1*15:01L
GKTFYVLPNDDTLR

SEQ ID NO: 21434 - protein, 13 aa, Severe acute respiratory syndrome coronavirus 2
  REGION 1..13: note = Table B: HLA-DRB1*03:01L HLA-DRB1*07:01L HLA-DQA1*01:03-B1*06:01L
IELKFNPPALQDA

SEQ ID NO: 21435 - protein, 13 aa, Severe acute respiratory syndrome coronavirus 2
  REGION 1..13: note = Table B: HLA-DRB1*03:01L HLA-DRB1*11:02L HLA-DPA1*01:03-B1*04:02L HLA-DQA1*01:03-B1*06:01L
ESPFVMMSAPPAQ

SEQ ID NO: 21436 - protein, 14 aa, Severe acute respiratory syndrome coronavirus 2
  REGION 1..14: note = Table B: HLA-DRB1*03:01L HLA-DQA1*01:01-B1*05:01L HLA-DRB4*01:01L HLA-DRB1*08:02L
NSYFTEQPIDLVPN

SEQ ID NO: 21437 - protein, 13 aa, Severe acute respiratory syndrome coronavirus 2
  REGION 1..13: note = Table B: HLA-DRB1*03:01L HLA-DRB1*08:01L HLA-DRB1*11:01L HLA-DRB1*12:02L
KVTFFPDLNGDVV

SEQ ID NO: 21438 - protein, 13 aa, Severe acute respiratory syndrome coronavirus 2
  REGION 1..13: note = Table B: HLA-DRB1*03:01L HLA-DRB5*01:01L
VTFFPDLNGDVVA

SEQ ID NO: 21439 - protein, 14 aa, Severe acute respiratory syndrome coronavirus 2
  REGION 1..14: note = Table B: HLA-DRB1*03:01L HLA-DRB1*11:02L HLA-DRB4*02:01NL HLA-DPA1*01:03-B1*02:01L HLA-DPA1*01:02-B1*04:01L HLA-DRB1*15:01L
SNSFDVLKSEDAQG

SEQ ID NO: 21440 - protein, 16 aa, Severe acute respiratory syndrome coronavirus 2
  REGION 1..16: note = Table B: HLA-DRB1*03:01L HLA-DPA1*02:01-B1*13:01L HLA-DPA1*03:01-B1*105:01L
SSLTIKKPNELSRVLG

SEQ ID NO: 21441 - protein, 16 aa, Severe acute respiratory syndrome coronavirus 2
  REGION 1..16: note = Table B: HLA-DRB1*03:01L HLA-DRB1*11:02L HLA-DPA1*01:03-B1*02:01L
VPWDTIANYAKPFLNK

SEQ ID NO: 21442 - protein, 14 aa, Severe acute respiratory syndrome coronavirus 2
  REGION 1..14: note = Table B: HLA-DRB1*03:01L HLA-DPA1*01:03-B1*02:01L
EASFNYLKSPNFSK

SEQ ID NO: 21443 - protein, 16 aa, Severe acute respiratory syndrome coronavirus 2
  REGION 1..16: note = Table B: HLA-DRB1*03:01L HLA-DRB1*13:01L
ASFYYVWKSYVHVVDG

SEQ ID NO: 21444 - protein, 12 aa, Severe acute respiratory syndrome coronavirus 2
  REGION 1..12: note = Table B: HLA-DRB1*03:01L HLA-DRB4*02:01NL HLA-DRB1*13:01L HLA-DPA1*01:03-B1*04:01L HLA-DPA1*01:03-B1*104:01L
GSTFISDEVARD

SEQ ID NO: 21445 - protein, 12 aa, Severe acute respiratory syndrome coronavirus 2
  REGION 1..12: note = Table B: HLA-DRB1*03:01L HLA-DRB1*13:01L HLA-DPA1*01:03-B1*02:01L
STFISDEVARDL

SEQ ID NO: 21446 - protein, 16 aa, Severe acute respiratory syndrome coronavirus 2
  REGION 1..16: note = Table B: HLA-DRB1*03:01L HLA-DRB1*11:02L HLA-DRB1*14:02L HLA-DRB1*08:03L
VARDLSLQFKRPINPT

SEQ ID NO: 21447 - protein, 14 aa, Severe acute respiratory syndrome coronavirus 2
  REGION 1..14: note = Table B: HLA-DRB1*03:01L
YIVDSVTVKNGSIH

SEQ ID NO: 21448 - protein, 14 aa, Severe acute respiratory syndrome coronavirus 2
  REGION 1..14: note = Table B: HLA-DRB1*03:01L HLA-DRB1*11:02L HLA-DRB4*01:01L HLA-DQA1*01:03-B1*06:01L HLA-DRB1*15:01L
LSHFVNLDNLRANN

SEQ ID NO: 21449 - protein, 14 aa, Severe acute respiratory syndrome coronavirus 2
  REGION 1..14: note = Table B: HLA-DRB1*03:01L HLA-DPA1*01:03-B1*04:02L
SHFVNLDNLRANNT

SEQ ID NO: 21450 - protein, 11 aa, Severe acute respiratory syndrome coronavirus 2
  REGION 1..11: note = Table B: HLA-DRB1*03:01L HLA-DRB3*01:01L HLA-DRB1*16:01L
VIVFDGKSKCE

SEQ ID NO: 21451 - protein, 14 aa, Severe acute respiratory syndrome coronavirus 2
  REGION 1..14: note = Table B: HLA-DRB1*03:01L HLA-DRB1*11:02L HLA-DRB4*01:01L HLA-DRB1*08:02L HLA-DRB1*15:01L
KTLVATAEAELAKN

SEQ ID NO: 21452 - protein, 16 aa, Severe acute respiratory syndrome coronavirus 2
  REGION 1..16: note = Table B: HLA-DRB1*03:01L
DNVLSTFISAARQGFV

SEQ ID NO: 21453 - protein, 14 aa, Severe acute respiratory syndrome coronavirus 2
  REGION 1..14: note = Table B: HLA-DRB1*03:01L
TFISAARQGFVDSD

SEQ ID NO: 21454 - protein, 18 aa, Severe acute respiratory syndrome coronavirus 2
  REGION 1..18: note = Table B: HLA-DRB1*03:01L
TRQVVNVVTTKIALKGGK

SEQ ID NO: 21455 - protein, 14 aa, Severe acute respiratory syndrome coronavirus 2
  REGION 1..14: note = Table B: HLA-DRB1*03:01L
AAIFYLITPVHVMS

SEQ ID NO: 21456 - protein, 14 aa, Severe acute respiratory syndrome coronavirus 2
  REGION 1..14: note = Table B: HLA-DRB1*03:01L
SEIIGYKAIDGGVT

SEQ ID NO: 21457 - protein, 12 aa, Severe acute respiratory syndrome coronavirus 2
  REGION 1..12: note = Table B: HLA-DRB1*03:01L
ESLRPDTRYVLM

SEQ ID NO: 21458 - protein, 12 aa, Severe acute respiratory syndrome coronavirus 2
  REGION 1..12: note = Table B: HLA-DRB1*03:01L
SLRPDTRYVLMD

SEQ ID NO: 21459 - protein, 14 aa, Severe acute respiratory syndrome coronavirus 2
  REGION 1..14: note = Table B: HLA-DRB1*03:01L HLA-DRB1*11:03L HLA-DRB1*14:02L HLA-DPA1*01:03-B1*104:01L
RWVLNNDYYRSLPG

SEQ ID NO: 21460 - protein, 15 aa, Severe acute respiratory syndrome coronavirus 2
  REGION 1..15: note = Table B: HLA-DRB1*03:01L HLA-DRB1*11:02L HLA-DRB5*01:01L HLA-DRB4*02:01NL HLA-DPA1*01:03-B1*04:02L HLA-DRB1*08:02L
TPLIQPIGALDISAS

SEQ ID NO: 21461 - protein, 14 aa, Severe acute respiratory syndrome coronavirus 2
  REGION 1..14: note = Table B: HLA-DRB1*03:01L HLA-DRB1*11:02L
FYLTNDVSFLAHIQ

SEQ ID NO: 21462 - protein, 17 aa, Severe acute respiratory syndrome coronavirus 2
  REGION 1..17: note = Table B: HLA-DRB1*03:01L
LKRRVVFNGVSFSTFEE

SEQ ID NO: 21463 - protein, 14 aa, Severe acute respiratory syndrome coronavirus 2
  REGION 1..14: note = Table B: HLA-DRB1*03:01L
NHNFLVQAGNVQLR

SEQ ID NO: 21464 - protein, 14 aa, Severe acute respiratory syndrome coronavirus 2
  REGION 1..14: note = Table B: HLA-DRB1*03:01L HLA-DQA1*01:01-B1*05:01L HLA-DPA1*02:01-B1*13:01L HLA-DRB1*07:01L HLA-DQA1*01:03-B1*06:01L
YGPFVDRQTAQAAG

SEQ ID NO: 21465 - protein, 16 aa, Severe acute respiratory syndrome coronavirus 2
  REGION 1..16: note = Table B: HLA-DRB1*03:01L HLA-DRB1*11:02L HLA-DRB4*01:01L HLA-DQA1*05:05-B1*03:116L
VAMKYNYEPLTQDHVD

SEQ ID NO: 21466 - protein, 15 aa, Severe acute respiratory syndrome coronavirus 2
  REGION 1..15: note = Table B: HLA-DRB1*03:01L HLA-DRB1*11:02L HLA-DRB4*02:01NL HLA-DPA1*01:03-B1*04:02L HLA-DPA1*01:03-B1*104:01L HLA-DRB1*08:02L HLA-DRB1*08:03L
TQEFRYMNSQGLLPP

SEQ ID NO: 21467 - protein, 17 aa, Severe acute respiratory syndrome coronavirus 2
  REGION 1..17: note = Table B: HLA-DRB1*03:01L
DSEVVLKKLKKSLNVAK

SEQ ID NO: 21468 - protein, 15 aa, Severe acute respiratory syndrome coronavirus 2
  REGION 1..15: note = Table B: HLA-DRB1*03:01L HLA-DRB1*11:02L HLA-DRB1*08:02L HLA-DRB1*15:01L
VPLNIIPLTTAAKLM

SEQ ID NO: 21469 - protein, 11 aa, Severe acute respiratory syndrome coronavirus 2
  REGION 1..11: note = Table B: HLA-DRB1*03:01L HLA-DRB4*01:01L HLA-DPA1*02:01-B1*13:01L HLA-DQA1*01:03-B1*06:01L HLA-DRB1*08:03L
VVDADSKIVQL

SEQ ID NO: 21470 - protein, 15 aa, Severe acute respiratory syndrome coronavirus 2
  REGION 1..15: note = Table B: HLA-DRB1*03:01L HLA-DRB1*11:02L HLA-DRB1*14:02L HLA-DRB1*09:01L HLA-DPA1*01:03-B1*04:02L HLA-DPA1*02:01-B1*13:01L HLA-DPA1*01:03-B1*02:01L HLA-DPA1*01:03-B1*104:01L HLA-DRB1*07:01L HLA-DRB1*08:02L
  REGION 1..15: note = CONT. FROM ABOVE: HLA-DRB1*08:03L HLA-DRB1*15:01L
WPLIVTALRANSAVK

SEQ ID NO: 21471 - protein, 14 aa, Severe acute respiratory syndrome coronavirus 2
  REGION 1..14: note = Table B: HLA-DRB1*03:01L HLA-DRB1*11:02L HLA-DRB1*13:01L HLA-DPA1*01:03-B1*04:02L
NSAVKLQNNELSPV

SEQ ID NO: 21472 - protein, 14 aa, Severe acute respiratory syndrome coronavirus 2
  REGION 1..14: note = Table B: HLA-DRB1*03:01L HLA-DRB1*11:02L HLA-DPA1*01:03-B1*04:02L
SAVKLQNNELSPVA

SEQ ID NO: 21473 - protein, 17 aa, Severe acute respiratory syndrome coronavirus 2
  REGION 1..17: note = Table B: HLA-DRB1*03:01L
EPPCRFVTDTPKGPKVK

SEQ ID NO: 21474 - protein, 17 aa, Severe acute respiratory syndrome coronavirus 2
  REGION 1..17: note = Table B: HLA-DRB1*03:01L
GPKVKYLYFIKGLNNLN

SEQ ID NO: 21475 - protein, 16 aa, Severe acute respiratory syndrome coronavirus 2
  REGION 1..16: note = Table B: HLA-DRB1*03:01L
VKYLYFIKGLNNLNRG

SEQ ID NO: 21476 - protein, 13 aa, Severe acute respiratory syndrome coronavirus 2
  REGION 1..13: note = Table B: HLA-DRB1*03:01L HLA-DRB1*11:01L HLA-DRB4*01:01L HLA-DRB3*01:01L HLA-DPA1*01:03-B1*02:01L HLA-DRB1*08:03L
RGMVLGSLAATVR

SEQ ID NO: 21477 - protein, 15 aa, Severe acute respiratory syndrome coronavirus 2
  REGION 1..15: note = Table B: HLA-DRB1*03:01L HLA-DPA1*01:02-B1*04:01L
LGSLAATVRLQAGNA

SEQ ID NO: 21478 - protein, 15 aa, Severe acute respiratory syndrome coronavirus 2
  REGION 1..15: note = Table B: HLA-DRB1*03:01L HLA-DRB1*13:01L HLA-DPA1*01:03-B1*04:01L HLA-DRB1*08:02L HLA-DRB1*15:01L
TGQAITVTPEANMDQ

SEQ ID NO: 21479 - protein, 15 aa, Severe acute respiratory syndrome coronavirus 2
  REGION 1..15: note = Table B: HLA-DRB1*03:01L HLA-DRB1*11:02L
REPMLQSADAQSFLN

SEQ ID NO: 21480 - protein, 15 aa, Severe acute respiratory syndrome coronavirus 2
  REGION 1..15: note = Table B: HLA-DRB1*03:01L
EPMLQSADAQSFLNR

SEQ ID NO: 21481 - protein, 17 aa, Severe acute respiratory syndrome coronavirus 2
  REGION 1..17: note = Table B: HLA-DRB1*03:01L
DDNLIDSYFVVKRHTFS

SEQ ID NO: 21482 - protein, 14 aa, Severe acute respiratory syndrome coronavirus 2
  REGION 1..14: note = Table B: HLA-DRB1*03:01L HLA-DQA1*05:05-B1*03:19L HLA-DRB1*13:01L HLA-DPA1*01:03-B1*104:01L HLA-DQA1*05:05-B1*03:01L HLA-DRB1*07:01L
IDSYFVVKRHTFSN

SEQ ID NO: 21483 - protein, 16 aa, Severe acute respiratory syndrome coronavirus 2
  REGION 1..16: note = Table B: HLA-DRB1*03:01L HLA-DRB4*01:01L HLA-DPA1*01:03-B1*04:01L
GYHFRELGVVHNQDVN

SEQ ID NO: 21484 - protein, 11 aa, Severe acute respiratory syndrome coronavirus 2
  REGION 1..11: note = Table B: HLA-DRB1*03:01L HLA-DPA1*02:01-B1*13:01L
VYAADPAMHAA

SEQ ID NO: 21485 - protein, 13 aa, Severe acute respiratory syndrome coronavirus 2
  REGION 1..13: note = Table B: HLA-DRB1*03:01L
ADPAMHAASGNLL

SEQ ID NO: 21486 - protein, 12 aa, Severe acute respiratory syndrome coronavirus 2
  REGION 1..12: note = Table B: HLA-DRB1*03:01L HLA-DRB3*01:01L HLA-DRB1*16:01L
GNLLLDKRTTCF

SEQ ID NO: 21487 - protein, 16 aa, Severe acute respiratory syndrome coronavirus 2
  REGION 1..16: note = Table B: HLA-DRB1*03:01L
VSKGFFKEGSSVELKH

SEQ ID NO: 21488 - protein, 12 aa, Severe acute respiratory syndrome coronavirus 2
  REGION 1..12: note = Table B: HLA-DRB1*03:01L HLA-DRB1*08:01L HLA-DPA1*01:03-B1*04:01L HLA-DRB1*04:10L HLA-DRB3*01:01L HLA-DPA1*02:01-B1*13:01L HLA-DRB1*10:01L HLA-DRB1*08:03L
NNLDKSAGFPFN

SEQ ID NO: 21489 - protein, 16 aa, Severe acute respiratory syndrome coronavirus 2
  REGION 1..16: note = Table B: HLA-DRB1*03:01L HLA-DRB4*01:01L HLA-DRB1*09:01L HLA-DPA1*01:03-B1*02:01L HLA-DRB1*07:01L
GKARLYYDSMSYEDQD

SEQ ID NO: 21490 - protein, 15 aa, Severe acute respiratory syndrome coronavirus 2
  REGION 1..15: note = Table B: HLA-DRB1*03:01L HLA-DRB1*11:03L HLA-DRB1*14:54L HLA-DRB1*08:03L
TKRNVIPTITQMNLK

SEQ ID NO: 21491 - protein, 14 aa, Severe acute respiratory syndrome coronavirus 2
  REGION 1..14: note = Table B: HLA-DRB1*03:01L HLA-DRB1*11:02L HLA-DRB1*13:01L HLA-DRB1*08:02L HLA-DRB1*08:03L
YAISAKNRARTVAG

SEQ ID NO: 21492 - protein, 15 aa, Severe acute respiratory syndrome coronavirus 2
  REGION 1..15: note = Table B: HLA-DRB1*03:01L HLA-DRB1*14:02L HLA-DPA1*01:03-B1*104:01L HLA-DPA1*01:02-B1*04:01L
HQKLLKSIAATRGAT

SEQ ID NO: 21493 - protein, 15 aa, Severe acute respiratory syndrome coronavirus 2
  REGION 1..15: note = Table B: HLA-DRB1*03:01L HLA-DRB1*11:02L HLA-DPA1*01:03-B1*04:02L HLA-DRB1*08:02L HLA-DRB1*08:03L
LKSIAATRGATVVIG

SEQ ID NO: 21494 - protein, 16 aa, Severe acute respiratory syndrome coronavirus 2
  REGION 1..16: note = Table B: HLA-DRB1*03:01L
DDYVYLPYPDPSRILG

SEQ ID NO: 21495 - protein, 17 aa, Severe acute respiratory syndrome coronavirus 2
  REGION 1..17: note = Table B: HLA-DRB1*03:01L
TSRYWEPEFYEAMYTPH

SEQ ID NO: 21496 - protein, 16 aa, Severe acute respiratory syndrome coronavirus 2
  REGION 1..16: note = Table B: HLA-DRB1*03:01L HLA-DRB1*15:01L
EPEFYEAMYTPHTVLQ

SEQ ID NO: 21497 - protein, 16 aa, Severe acute respiratory syndrome coronavirus 2
  REGION 1..16: note = Table B: HLA-DRB1*03:01L
ERLKLFAAETLKATEE

SEQ ID NO: 21498 - protein, 15 aa, Severe acute respiratory syndrome coronavirus 2
  REGION 1..15: note = Table B: HLA-DRB1*03:01L HLA-DRB1*11:02L
LKLFAAETLKATEET

SEQ ID NO: 21499 - protein, 13 aa, Severe acute respiratory syndrome coronavirus 2
  REGION 1..13: note = Table B: HLA-DRB1*03:01L HLA-DRB1*14:02L
GYRVTKNSKVQIG

SEQ ID NO: 21500 - protein, 15 aa, Severe acute respiratory syndrome coronavirus 2
  REGION 1..15: note = Table B: HLA-DRB1*03:01L HLA-DRB1*11:03L
RARVECFDKFKVNST

SEQ ID NO: 21501 - protein, 13 aa, Severe acute respiratory syndrome coronavirus 2
  REGION 1..13: note = Table B: HLA-DRB1*03:01L HLA-DRB1*11:02L HLA-DRB1*11:04L HLA-DRB1*08:01L HLA-DPA1*01:03-B1*04:01L HLA-DRB3*01:01L HLA-DRB1*07:01L
DIVVFDEISMATN

SEQ ID NO: 21502 - protein, 11 aa, Severe acute respiratory syndrome coronavirus 2
  REGION 1..11: note = Table B: HLA-DRB1*03:01L HLA-DRB1*11:03L
LVYDNKLKAHK

SEQ ID NO: 21503 - protein, 14 aa, Severe acute respiratory syndrome coronavirus 2
  REGION 1..14: note = Table B: HLA-DRB1*03:01L
EFLTRNPAWRKAVF

SEQ ID NO: 21504 - protein, 13 aa, Severe acute respiratory syndrome coronavirus 2
  REGION 1..13: note = Table B: HLA-DRB1*03:01L HLA-DQA1*01:01-B1*05:01L HLA-DRB4*02:01NL HLA-DRB1*13:01L HLA-DRB4*01:01L HLA-DPA1*01:03-B1*04:01L HLA-DPA1*01:03-B1*04:02L HLA-DRB3*01:01L HLA-DPA1*02:01-B1*13:01L
  REGION 1..13: note = CONT. FROM ABOVE: HLA-DPA1*01:03-B1*02:01L HLA-DPA1*01:03-B1*104 :01L HLA-DPA1*01:02-B1*04:01L HLA-DRB1*08:02L
ISPYNSQNAVASK

SEQ ID NO: 21505 - protein, 14 aa, Severe acute respiratory syndrome coronavirus 2
  REGION 1..14: note = Table B: HLA-DRB1*03:01L HLA-DRB1*11:02L HLA-DQA1*01:01-B1*05:01L HLA-DRB5*01:01L HLA-DRB1*13:01L HLA-DPA1*01:03-B1*04:01L HLA-DPA1*01:03-B1*04:02L HLA-DPA1*01:03-B1*02:01L HLA-DRB1*08:02L
ASKILGLPTQTVDS

SEQ ID NO: 21506 - protein, 16 aa, Severe acute respiratory syndrome coronavirus 2
  REGION 1..16: note = Table B: HLA-DRB1*03:01L HLA-DRB1*08:02L HLA-DRB1*15:01L
DKLQFTSLEIPRRNVA

SEQ ID NO: 21507 - protein, 16 aa, Severe acute respiratory syndrome coronavirus 2
  REGION 1..16: note = Table B: HLA-DRB1*03:01L HLA-DPA1*01:03-B1*04:02L HLA-DRB1*08:02L HLA-DRB1*15:01L
IPRRNVATLQAENVTG

SEQ ID NO: 21508 - protein, 11 aa, Severe acute respiratory syndrome coronavirus 2
  REGION 1..11: note = Table B: HLA-DRB1*03:01L HLA-DRB1*14:02L HLA-DPA1*01:03-B1*04:01L HLA-DQA1*02:01-B1*03:03L
DIPGIPKDMTY

SEQ ID NO: 21509 - protein, 15 aa, Severe acute respiratory syndrome coronavirus 2
  REGION 1..15: note = Table B: HLA-DRB1*03:01L
GFDYVYNPFMIDVQQ

SEQ ID NO: 21510 - protein, 15 aa, Severe acute respiratory syndrome coronavirus 2
  REGION 1..15: note = Table B: HLA-DRB1*03:01L HLA-DRB1*13:01L
YNLWNTFTRLQSLEN

SEQ ID NO: 21511 - protein, 14 aa, Severe acute respiratory syndrome coronavirus 2
  REGION 1..14: note = Table B: HLA-DRB1*03:01L
WNTFTRLQSLENVA

SEQ ID NO: 21512 - protein, 15 aa, Severe acute respiratory syndrome coronavirus 2
  REGION 1..15: note = Table B: HLA-DRB1*03:01L HLA-DRB1*11:02L HLA-DQA1*01:01-B1*05:01L HLA-DRB1*13:01L HLA-DQA1*05:05-B1*03:116L HLA-DRB1*08:02L
LQSLENVAFNVVNKG

SEQ ID NO: 21513 - protein, 13 aa, Severe acute respiratory syndrome coronavirus 2
  REGION 1..13: note = Table B: HLA-DRB1*03:01L HLA-DRB1*11:02L HLA-DQA1*05:05-B1*03:116L HLA-DPA1*01:03-B1*02:01L HLA-DRB1*15:01L
NTVYTKVDGVDVE

SEQ ID NO: 21514 - protein, 19 aa, Severe acute respiratory syndrome coronavirus 2
  REGION 1..19: note = Table B: HLA-DRB1*03:01L HLA-DQA1*05:05-B1*03:19L HLA-DQA1*05:05-B1*03:116L
LPVNVAFELWAKRNIKPVP

SEQ ID NO: 21515 - protein, 11 aa, Severe acute respiratory syndrome coronavirus 2
  REGION 1..11: note = Table B: HLA-DRB1*03:01L HLA-DRB1*11:02L HLA-DQA1*01-B1*05L HLA-DRB1*15:03L
DIAANTVIWDY

SEQ ID NO: 21516 - protein, 14 aa, Severe acute respiratory syndrome coronavirus 2
  REGION 1..14: note = Table B: HLA-DRB1*03:01L HLA-DPA1*01:03-B1*104:01L HLA-DRB1*08:02L
NGVLITEGSVKGLQ

SEQ ID NO: 21517 - protein, 16 aa, Severe acute respiratory syndrome coronavirus 2
  REGION 1..16: note = Table B: HLA-DRB1*03:01L HLA-DRB1*13:01L HLA-DPA1*01:03-B1*104:01L HLA-DRB1*10:01L HLA-DQA1*01:03-B1*06:01L
VKTQFNYYKKVDGVVQ

SEQ ID NO: 21518 - protein, 16 aa, Severe acute respiratory syndrome coronavirus 2
  REGION 1..16: note = Table B: HLA-DRB1*03:01L
IDLLLDDFVEIIKSQD

SEQ ID NO: 21519 - protein, 13 aa, Severe acute respiratory syndrome coronavirus 2
  REGION 1..13: note = Table B: HLA-DRB1*03:01L HLA-DRB1*11:02L HLA-DQA1*01:01-B1*05:01L HLA-DRB1*13:01L HLA-DPA1*01:03-B1*04:01L HLA-DPA1*01:03-B1*04:02L HLA-DRB3*01:01L HLA-DPA1*01:03-B1*02:01L HLA-DRB1*08:02L
  REGION 1..13: note = CONT. FROM ABOVE: HLA-DRB1*15:01L
VEIIKSQDLSVVS

SEQ ID NO: 21520 - protein, 12 aa, Severe acute respiratory syndrome coronavirus 2
  REGION 1..12: note = Table B: HLA-DRB1*03:01L HLA-DRB1*11:02L
IFWRNTNPIQLS

SEQ ID NO: 21521 - protein, 16 aa, Severe acute respiratory syndrome coronavirus 2
  REGION 1..16: note = Table B: HLA-DRB1*03:01L HLA-DRB1*13:01L
LSLLSKGRLIIRENNR

SEQ ID NO: 21522 - protein, 13 aa, Severe acute respiratory syndrome coronavirus 2
  REGION 1..13: note = Table B: HLA-DRB1*03:01L HLA-DRB1*11:02L HLA-DRB1*13:01L HLA-DPA1*01:03-B1*02:01L HLA-DRB1*08:02L
NRVVISSDVLVNN

SEQ ID NO: 21523 - protein, 14 aa, Severe acute respiratory syndrome coronavirus 2
  REGION 1..14: note = Table B: HLA-DRB1*03:01L HLA-DRB1*07:01L
FHAIHVSGTNGTKR

SEQ ID NO: 21524 - protein, 14 aa, Severe acute respiratory syndrome coronavirus 2
  REGION 1..14: note = Table B: HLA-DRB1*03:01L HLA-DRB1*07:01L
VYFASTEKSNIIRG

SEQ ID NO: 21525 - protein, 16 aa, Severe acute respiratory syndrome coronavirus 2
  REGION 1..16: note = Table B: HLA-DRB1*03:01L HLA-DRB1*11:02L HLA-DQA1*05:05-B1*03:116L
IIRGWIFGTTLDSKTQ

SEQ ID NO: 21526 - protein, 13 aa, Severe acute respiratory syndrome coronavirus 2
  REGION 1..13: note = Table B: HLA-DRB1*03:01L HLA-DRB1*11:02L HLA-DRB1*11:01L HLA-DRB4*01:01L HLA-DRB1*09:01L HLA-DRB3*01:01L HLA-DRB1*07:01L HLA-DRB1*08:03L
SLLIVNNATNVVI

SEQ ID NO: 21527 - protein, 15 aa, Severe acute respiratory syndrome coronavirus 2
  REGION 1..15: note = Table B: HLA-DRB1*03:01L HLA-DRB1*11:02L
GVYYHKNNKSWMESE

SEQ ID NO: 21528 - protein, 16 aa, Severe acute respiratory syndrome coronavirus 2
  REGION 1..16: note = Table B: HLA-DRB1*03:01L HLA-DQA1*05:05-B1*03:116L HLA-DRB1*08:02L
ESEFRVYSSANNCTFE

SEQ ID NO: 21529 - protein, 13 aa, Severe acute respiratory syndrome coronavirus 2
  REGION 1..13: note = Table B: HLA-DRB1*03:01L
NITRFQTLLALHR

SEQ ID NO: 21530 - protein, 15 aa, Severe acute respiratory syndrome coronavirus 2
  REGION 1..15: note = Table B: HLA-DRB1*03:01L HLA-DRB1*11:02L HLA-DRB3*01:01L
TFLLKYNENGTITDA

SEQ ID NO: 21531 - protein, 14 aa, Severe acute respiratory syndrome coronavirus 2
  REGION 1..14: note = Table B: HLA-DRB1*03:01L HLA-DRB1*11:02L HLA-DRB1*08:02L
VIAWNSNNLDSKVG

SEQ ID NO: 21532 - protein, 15 aa, Severe acute respiratory syndrome coronavirus 2
  REGION 1..15: note = Table B: HLA-DRB1*03:01L HLA-DQA1*05:05-B1*03:116L
ISTEIYQAGSTPCNG

SEQ ID NO: 21533 - protein, 16 aa, Severe acute respiratory syndrome coronavirus 2
  REGION 1..16: note = Table B: HLA-DRB1*03:01L HLA-DRB1*11:02L HLA-DRB4*01:01L HLA-DPA1*01:03-B1*04:01L HLA-DRB1*04:10L HLA-DRB1*09:01L HLA-DRB1*07:01L
LPFQQFGRDIADTTDA

SEQ ID NO: 21534 - protein, 15 aa, Severe acute respiratory syndrome coronavirus 2
  REGION 1..15: note = Table B: HLA-DRB1*03:01L HLA-DRB1*11:02L
LQDVVNQNAQALNTL

SEQ ID NO: 21535 - protein, 15 aa, Severe acute respiratory syndrome coronavirus 2
  REGION 1..15: note = Table B: HLA-DRB1*03:01L HLA-DRB1*11:02L HLA-DQA1*01:01-B1*05:01L HLA-DPA1*01:03-B1*02:01L HLA-DRB1*08:02L HLA-DRB1*15:01L
NTLVKQLSSNFGAIS

SEQ ID NO: 21536 - protein, 16 aa, Severe acute respiratory syndrome coronavirus 2
  REGION 1..16: note = Table B: HLA-DRB1*03:01L HLA-DRB1*13:01L HLA-DRB4*01:01L HLA-DQA1*05:05-B1*03:116L
VTQQLIRAAEIRASAN

SEQ ID NO: 21537 - protein, 19 aa, Severe acute respiratory syndrome coronavirus 2
  REGION 1..19: note = Table B: HLA-DRB1*03:01L
APHGVVFLHVTYVPAQEKN

SEQ ID NO: 21538 - protein, 12 aa, Severe acute respiratory syndrome coronavirus 2
  REGION 1..12: note = Table B: HLA-DRB1*03:01L HLA-DRB1*14:01L HLA-DRB3*01:01L
AICHDGKAHFPR

SEQ ID NO: 21539 - protein, 13 aa, Severe acute respiratory syndrome coronavirus 2
  REGION 1..13: note = Table B: HLA-DRB1*03:01L
CKFDEDDSEPVLK

SEQ ID NO: 21540 - protein, 11 aa, Severe acute respiratory syndrome coronavirus 2
  REGION 1..11: note = Table B: HLA-DRB1*03:01L
EPVLKGVKLHY

SEQ ID NO: 21541 - protein, 16 aa, Severe acute respiratory syndrome coronavirus 2
  REGION 1..16: note = Table B: HLA-DRB1*03:01L
TSDYYQLYSTQLSTDT

SEQ ID NO: 21542 - protein, 16 aa, Severe acute respiratory syndrome coronavirus 2
  REGION 1..16: note = Table B: HLA-DRB1*03:01L
SDYYQLYSTQLSTDTG

SEQ ID NO: 21543 - protein, 13 aa, Severe acute respiratory syndrome coronavirus 2
  REGION 1..13: note = Table B: HLA-DRB1*03:01L
YNKIVDEPEEHVQ

SEQ ID NO: 21544 - protein, 14 aa, Severe acute respiratory syndrome coronavirus 2
  REGION 1..14: note = Table B: HLA-DRB1*03:01L HLA-DRB1*11:02L
TNILLNVPLHGTIL

SEQ ID NO: 21545 - protein, 14 aa, Severe acute respiratory syndrome coronavirus 2
  REGION 1..14: note = Table B: HLA-DRB1*03:01L HLA-DRB1*11:02L HLA-DRB4*02:01NL HLA-DRB1*13:01L HLA-DPA1*01:03-B1*04:01L HLA-DPA1*01:03-B1*04:02L HLA-DPA1*01:03-B1*02:01L HLA-DPA1*01:03-B1*104:01L HLA-DRB1*08:02L HLA-DRB1*15:01L
LSYYKLGASQRVAG

SEQ ID NO: 21546 - protein, 16 aa, Severe acute respiratory syndrome coronavirus 2
  REGION 1..16: note = Table B: HLA-DRB1*03:01L HLA-DQA1*05:05-B1*03:116L
SYYKLGASQRVAGDSG

SEQ ID NO: 21547 - protein, 17 aa, Severe acute respiratory syndrome coronavirus 2
  REGION 1..17: note = Table B: HLA-DRB1*03:01L HLA-DRB1*14:02L
APLIELCVDEAGSKSPI

SEQ ID NO: 21548 - protein, 16 aa, Severe acute respiratory syndrome coronavirus 2
  REGION 1..16: note = Table B: HLA-DRB1*03:01L
FTALTQHGKEDLKFPR

SEQ ID NO: 21549 - protein, 15 aa, Severe acute respiratory syndrome coronavirus 2
  REGION 1..15: note = Table B: HLA-DRB1*03:01L HLA-DRB1*11:02L HLA-DQA1*01:01-B1*05:01L HLA-DQA1*01-B1*05L HLA-DQA1*05:01-B1*02:01L HLA-DRB1*13:01L HLA-DRB1*09:01L HLA-DPA1*01:03-B1*04:02L HLA-DRB1*12:02L HLA-DRB3*01:01L
  REGION 1..15: note = CONT. FROM ABOVE: HLA-DPA1*01:03-B1*02:01L HLA-DPA1*01:03-B1*104 :01L HLA-DPA1*01:02-B1*04:01L HLA-DRB1*07:01L HLA-DRB1*08:02L HL A-DRB1*15:01L
LPKGFYAEGSRGGSQ

SEQ ID NO: 21550 - protein, 16 aa, Severe acute respiratory syndrome coronavirus 2
  REGION 1..16: note = Table B: HLA-DRB1*03:01L HLA-DRB1*14:01L HLA-DRB1*11:04L HLA-DRB3*01:01L
KPRQKRTATKAYNVTQ

SEQ ID NO: 21551 - protein, 16 aa, Severe acute respiratory syndrome coronavirus 2
  REGION 1..16: note = Table B: HLA-DRB1*03:01L
TQGNFGDQELIRQGTD

SEQ ID NO: 21552 - protein, 13 aa, Severe acute respiratory syndrome coronavirus 2
  REGION 1..13: note = Table B: HLA-DRB1*14:01L
VGEIPVAYRKVLL

SEQ ID NO: 21553 - protein, 13 aa, Severe acute respiratory syndrome coronavirus 2
  REGION 1..13: note = Table B: HLA-DRB1*14:01L
GEIPVAYRKVLLR

SEQ ID NO: 21554 - protein, 13 aa, Severe acute respiratory syndrome coronavirus 2
  REGION 1..13: note = Table B: HLA-DRB1*14:01L HLA-DRB1*08:01L HLA-DRB1*12:01L HLA-DRB3*01:01L HLA-DRB1*15:03L
EIPVAYRKVLLRK

SEQ ID NO: 21555 - protein, 15 aa, Severe acute respiratory syndrome coronavirus 2
  REGION 1..15: note = Table B: HLA-DRB1*14:01L HLA-DRB1*11:04L HLA-DRB1*11:01L HLA-DRB3*01:01L HLA-DRB1*15:03L
RKVLLRKNGNKGAGG

SEQ ID NO: 21556 - protein, 16 aa, Severe acute respiratory syndrome coronavirus 2
  REGION 1..16: note = Table B: HLA-DRB1*14:01L HLA-DRB1*15:03L
IKDLLARAGKASCTLS

SEQ ID NO: 21557 - protein, 14 aa, Severe acute respiratory syndrome coronavirus 2
  REGION 1..14: note = Table B: HLA-DRB1*14:01L HLA-DRB3*01:01L HLA-DRB1*04:08L HLA-DRB1*15:03L
KTIQPRVEKKKLDG

SEQ ID NO: 21558 - protein, 14 aa, Severe acute respiratory syndrome coronavirus 2
  REGION 1..14: note = Table B: HLA-DRB1*14:01L HLA-DRB1*08:01L HLA-DRB1*12:01L HLA-DRB1*16:01L HLA-DRB1*04:08L HLA-DQA1*02:01-B1*03:03L HLA-DRB1*15:03L
TILRKGGRTIAFGG

SEQ ID NO: 21559 - protein, 11 aa, Severe acute respiratory syndrome coronavirus 2
  REGION 1..11: note = Table B: HLA-DRB1*14:01L
NIGCNHTGVVG

SEQ ID NO: 21560 - protein, 10 aa, Severe acute respiratory syndrome coronavirus 2
  REGION 1..10: note = Table B: HLA-DRB1*14:01L HLA-DPA1*01:02-B1*04:01L
LEILQKEKVN

SEQ ID NO: 21561 - protein, 10 aa, Severe acute respiratory syndrome coronavirus 2
  REGION 1..10: note = Table B: HLA-DRB1*14:01L
ILQKEKVNIN

SEQ ID NO: 21562 - protein, 12 aa, Severe acute respiratory syndrome coronavirus 2
  REGION 1..12: note = Table B: HLA-DRB1*14:01L HLA-DRB1*12:01L HLA-DRB1*16:01L
KVNINIVGDFKL

SEQ ID NO: 21563 - protein, 11 aa, Severe acute respiratory syndrome coronavirus 2
  REGION 1..11: note = Table B: HLA-DRB1*14:01L
INIVGDFKLNE

SEQ ID NO: 21564 - protein, 12 aa, Severe acute respiratory syndrome coronavirus 2
  REGION 1..12: note = Table B: HLA-DRB1*14:01L HLA-DRB1*04:08L
ARVVRSIFSRTL

SEQ ID NO: 21565 - protein, 12 aa, Severe acute respiratory syndrome coronavirus 2
  REGION 1..12: note = Table B: HLA-DRB1*14:01L
QNSVRVLQKAAI

SEQ ID NO: 21566 - protein, 13 aa, Severe acute respiratory syndrome coronavirus 2
  REGION 1..13: note = Table B: HLA-DRB1*14:01L HLA-DRB1*14:17L HLA-DRB1*16:01L
TGGVVQLTSQWLT

SEQ ID NO: 21567 - protein, 11 aa, Severe acute respiratory syndrome coronavirus 2
  REGION 1..11: note = Table B: HLA-DRB1*14:01L HLA-DRB1*08:01L
GQIVTCAKEIK

SEQ ID NO: 21568 - protein, 14 aa, Severe acute respiratory syndrome coronavirus 2
  REGION 1..14: note = Table B: HLA-DRB1*14:01L HLA-DRB1*08:01L HLA-DRB1*11:01L
VEAPLVGTPVCING

SEQ ID NO: 21569 - protein, 15 aa, Severe acute respiratory syndrome coronavirus 2
  REGION 1..15: note = Table B: HLA-DRB1*14:01L
LDERIDKVLNEKCSA

SEQ ID NO: 21570 - protein, 12 aa, Severe acute respiratory syndrome coronavirus 2
  REGION 1..12: note = Table B: HLA-DRB1*14:01L HLA-DRB1*14:54L
ADIVEEAKKVKP

SEQ ID NO: 21571 - protein, 13 aa, Severe acute respiratory syndrome coronavirus 2
  REGION 1..13: note = Table B: HLA-DRB1*14:01L HLA-DRB1*08:01L HLA-DPA1*03:01-B1*105:01L
VNAANVYLKHGGG

SEQ ID NO: 21572 - protein, 11 aa, Severe acute respiratory syndrome coronavirus 2
  REGION 1..11: note = Table B: HLA-DRB1*14:01L HLA-DRB1*14:02L HLA-DPA1*01:03-B1*04:01L HLA-DRB1*09:01L HLA-DPA1*01:03-B1*04:02L HLA-DRB1*12:01L HLA-DRB1*10:01L HLA-DRB1*08:03L
SAYENFNQHEV

SEQ ID NO: 21573 - protein, 12 aa, Severe acute respiratory syndrome coronavirus 2
  REGION 1..12: note = Table B: HLA-DRB1*14:01L
VKPFITESKPSV

SEQ ID NO: 21574 - protein, 15 aa, Severe acute respiratory syndrome coronavirus 2
  REGION 1..15: note = Table B: HLA-DRB1*14:01L
HPDSATLVSDIDITF

SEQ ID NO: 21575 - protein, 13 aa, Severe acute respiratory syndrome coronavirus 2
  REGION 1..13: note = Table B: HLA-DRB1*14:01L
IVGDVVQEGVLTA

SEQ ID NO: 21576 - protein, 12 aa, Severe acute respiratory syndrome coronavirus 2
  REGION 1..12: note = Table B: HLA-DRB1*14:01L HLA-DRB1*14:54L
TAVVIPTKKAGG

SEQ ID NO: 21577 - protein, 14 aa, Severe acute respiratory syndrome coronavirus 2
  REGION 1..14: note = Table B: HLA-DRB1*14:01L HLA-DRB1*16:01L HLA-DRB1*15:03L
GTTEMLAKALRKVP

SEQ ID NO: 21578 - protein, 11 aa, Severe acute respiratory syndrome coronavirus 2
  REGION 1..11: note = Table B: HLA-DRB1*14:01L
PSIISNEKQEI

SEQ ID NO: 21579 - protein, 11 aa, Severe acute respiratory syndrome coronavirus 2
  REGION 1..11: note = Table B: HLA-DRB1*14:01L
GTVSWNLREML

SEQ ID NO: 21580 - protein, 12 aa, Severe acute respiratory syndrome coronavirus 2
  REGION 1..12: note = Table B: HLA-DRB1*14:01L
TVSWNLREMLAH

SEQ ID NO: 21581 - protein, 13 aa, Severe acute respiratory syndrome coronavirus 2
  REGION 1..13: note = Table B: HLA-DRB1*14:01L
STIQRKYKGIKIQ

SEQ ID NO: 21582 - protein, 11 aa, Severe acute respiratory syndrome coronavirus 2
  REGION 1..11: note = Table B: HLA-DRB1*14:01L HLA-DRB1*08:01L
YFYTSKTTVAS

SEQ ID NO: 21583 - protein, 12 aa, Severe acute respiratory syndrome coronavirus 2
  REGION 1..12: note = Table B: HLA-DRB1*14:01L
LNLEEAARYMRS

SEQ ID NO: 21584 - protein, 12 aa, Severe acute respiratory syndrome coronavirus 2
  REGION 1..12: note = Table B: HLA-DRB1*14:01L HLA-DRB1*08:01L
AARYMRSLKVPA

SEQ ID NO: 21585 - protein, 14 aa, Severe acute respiratory syndrome coronavirus 2
  REGION 1..14: note = Table B: HLA-DRB1*14:01L HLA-DPA1*02:01-B1*13:01L HLA-DPA1*03:01-B1*105:01L
DNLKTLLSLREVRT

SEQ ID NO: 21586 - protein, 12 aa, Severe acute respiratory syndrome coronavirus 2
  REGION 1..12: note = Table B: HLA-DRB1*14:01L
SALNHTKKWKYP

SEQ ID NO: 21587 - protein, 12 aa, Severe acute respiratory syndrome coronavirus 2
  REGION 1..12: note = Table B: HLA-DRB1*14:01L HLA-DQA1*05:01-B1*02:01L HLA-DRB1*12:01L
ATALLTLQQIEL

SEQ ID NO: 21588 - protein, 12 aa, Severe acute respiratory syndrome coronavirus 2
  REGION 1..12: note = Table B: HLA-DRB1*14:01L HLA-DRB1*15:03L
LGDVRETMSYLF

SEQ ID NO: 21589 - protein, 12 aa, Severe acute respiratory syndrome coronavirus 2
  REGION 1..12: note = Table B: HLA-DRB1*14:01L HLA-DRB1*08:01L
HANLDSCKRVLN

SEQ ID NO: 21590 - protein, 13 aa, Severe acute respiratory syndrome coronavirus 2
  REGION 1..13: note = Table B: HLA-DRB1*14:01L
GVEAVMYMGTLSY

SEQ ID NO: 21591 - protein, 13 aa, Severe acute respiratory syndrome coronavirus 2
  REGION 1..13: note = Table B: HLA-DRB1*14:01L HLA-DRB1*08:01L HLA-DRB1*12:01L
APPAQYELKHGTF

SEQ ID NO: 21592 - protein, 13 aa, Severe acute respiratory syndrome coronavirus 2
  REGION 1..13: note = Table B: HLA-DRB1*14:01L HLA-DRB1*08:01L HLA-DQA1*03:01-B1*03:02L
PPAQYELKHGTFT

SEQ ID NO: 21593 - protein, 13 aa, Severe acute respiratory syndrome coronavirus 2
  REGION 1..13: note = Table B: HLA-DRB1*14:01L
GALLTKSSEYKGP

SEQ ID NO: 21594 - protein, 16 aa, Severe acute respiratory syndrome coronavirus 2
  REGION 1..16: note = Table B: HLA-DRB1*14:01L
DVFYKENSYTTTIKPV

SEQ ID NO: 21595 - protein, 13 aa, Severe acute respiratory syndrome coronavirus 2
  REGION 1..13: note = Table B: HLA-DRB1*14:01L HLA-DPA1*02:01-B1*13:01L
LTGYKKPASRELK

SEQ ID NO: 21596 - protein, 13 aa, Severe acute respiratory syndrome coronavirus 2
  REGION 1..13: note = Table B: HLA-DRB1*14:01L
KDVLECNVKTTEV

SEQ ID NO: 21597 - protein, 13 aa, Severe acute respiratory syndrome coronavirus 2
  REGION 1..13: note = Table B: HLA-DRB1*14:01L HLA-DQA1*01:03-B1*06:01L
DVLECNVKTTEVV

SEQ ID NO: 21598 - protein, 13 aa, Severe acute respiratory syndrome coronavirus 2
  REGION 1..13: note = Table B: HLA-DRB1*14:01L HLA-DRB1*14:54L HLA-DPA1*01:02-B1*04:01L HLA-DRB1*04:08L
VDNSSLTIKKPNE

SEQ ID NO: 21599 - protein, 12 aa, Severe acute respiratory syndrome coronavirus 2
  REGION 1..12: note = Table B: HLA-DRB1*14:01L
LGLKTLATHGLA

SEQ ID NO: 21600 - protein, 13 aa, Severe acute respiratory syndrome coronavirus 2
  REGION 1..13: note = Table B: HLA-DRB1*14:01L HLA-DRB1*08:01L
SVPWDTIANYAKP

SEQ ID NO: 21601 - protein, 12 aa, Severe acute respiratory syndrome coronavirus 2
  REGION 1..12: note = Table B: HLA-DRB1*14:01L
TTIAKNTVKSVG

SEQ ID NO: 21602 - protein, 13 aa, Severe acute respiratory syndrome coronavirus 2
  REGION 1..13: note = Table B: HLA-DRB1*14:01L
KNTVKSVGKFCLE

SEQ ID NO: 21603 - protein, 13 aa, Severe acute respiratory syndrome coronavirus 2
  REGION 1..13: note = Table B: HLA-DRB1*14:01L
VARDLSLQFKRPI

SEQ ID NO: 21604 - protein, 12 aa, Severe acute respiratory syndrome coronavirus 2
  REGION 1..12: note = Table B: HLA-DRB1*14:01L
RDLSLQFKRPIN

SEQ ID NO: 21605 - protein, 14 aa, Severe acute respiratory syndrome coronavirus 2
  REGION 1..14: note = Table B: HLA-DRB1*14:01L HLA-DRB3*01:01L
QKTYERHSLSHFVN

SEQ ID NO: 21606 - protein, 13 aa, Severe acute respiratory syndrome coronavirus 2
  REGION 1..13: note = Table B: HLA-DRB1*14:01L
LDNLRANNTKGSL

SEQ ID NO: 21607 - protein, 10 aa, Severe acute respiratory syndrome coronavirus 2
  REGION 1..10: note = Table B: HLA-DRB1*14:01L
IVFDGKSKCE

SEQ ID NO: 21608 - protein, 12 aa, Severe acute respiratory syndrome coronavirus 2
  REGION 1..12: note = Table B: HLA-DRB1*14:01L
NVPMEKLKTLVA

SEQ ID NO: 21609 - protein, 12 aa, Severe acute respiratory syndrome coronavirus 2
  REGION 1..12: note = Table B: HLA-DRB1*14:01L HLA-DRB1*15:03L
AELAKNVSLDNV

SEQ ID NO: 21610 - protein, 10 aa, Severe acute respiratory syndrome coronavirus 2
  REGION 1..10: note = Table B: HLA-DRB1*14:01L HLA-DQA1*02:01-B1*03:03L HLA-DRB1*15:03L
FISAARQGFV

SEQ ID NO: 21611 - protein, 13 aa, Severe acute respiratory syndrome coronavirus 2
  REGION 1..13: note = Table B: HLA-DRB1*14:01L HLA-DRB1*15:03L
HINAQVAKSHNIA

SEQ ID NO: 21612 - protein, 13 aa, Severe acute respiratory syndrome coronavirus 2
  REGION 1..13: note = Table B: HLA-DRB1*14:01L HLA-DRB1*08:01L
KQIRSAAKKNNLP

SEQ ID NO: 21613 - protein, 13 aa, Severe acute respiratory syndrome coronavirus 2
  REGION 1..13: note = Table B: HLA-DRB1*14:01L HLA-DRB1*08:01L
QIRSAAKKNNLPF

SEQ ID NO: 21614 - protein, 11 aa, Severe acute respiratory syndrome coronavirus 2
  REGION 1..11: note = Table B: HLA-DRB1*14:01L HLA-DPA1*01:02-B1*04:01L HLA-DRB1*16:01L HLA-DRB1*15:03L
IVNNWLKQLIK

SEQ ID NO: 21615 - protein, 12 aa, Severe acute respiratory syndrome coronavirus 2
  REGION 1..12: note = Table B: HLA-DRB1*14:01L
NNWLKQLIKVTL

SEQ ID NO: 21616 - protein, 14 aa, Severe acute respiratory syndrome coronavirus 2
  REGION 1..14: note = Table B: HLA-DRB1*14:01L HLA-DRB1*12:01L HLA-DRB1*15:03L
TRDIASTDTCFANK

SEQ ID NO: 21617 - protein, 14 aa, Severe acute respiratory syndrome coronavirus 2
  REGION 1..14: note = Table B: HLA-DRB1*14:01L HLA-DRB1*11:04L HLA-DRB1*11:01L HLA-DRB1*12:01L HLA-DRB3*01:01L HLA-DRB1*15:03L
RDIASTDTCFANKH

SEQ ID NO: 21618 - protein, 11 aa, Severe acute respiratory syndrome coronavirus 2
  REGION 1..11: note = Table B: HLA-DRB1*14:01L HLA-DQA1*03:01-B1*03:02L
DTWFSQRGGSY

SEQ ID NO: 21619 - protein, 10 aa, Severe acute respiratory syndrome coronavirus 2
  REGION 1..10: note = Table B: HLA-DRB1*14:01L
LHFLPRVFSA

SEQ ID NO: 21620 - protein, 12 aa, Severe acute respiratory syndrome coronavirus 2
  REGION 1..12: note = Table B: HLA-DRB1*14:01L HLA-DPA1*02:01-B1*13:01L
VAYESLRPDTRY

SEQ ID NO: 21621 - protein, 12 aa, Severe acute respiratory syndrome coronavirus 2
  REGION 1..12: note = Table B: HLA-DRB1*14:01L HLA-DRB1*12:01L HLA-DRB1*16:01L HLA-DRB1*15:03L
TPLIQPIGALDI

SEQ ID NO: 21622 - protein, 12 aa, Severe acute respiratory syndrome coronavirus 2
  REGION 1..12: note = Table B: HLA-DRB1*14:01L HLA-DPA1*01:03-B1*04:01L HLA-DPA1*01:03-B1*04:02L HLA-DRB1*12:01L
VSFLAHIQWMVM

SEQ ID NO: 21623 - protein, 12 aa, Severe acute respiratory syndrome coronavirus 2
  REGION 1..12: note = Table B: HLA-DRB1*14:01L HLA-DRB1*12:01L HLA-DPA1*01:02-B1*04:01L HLA-DRB1*16:01L HLA-DRB1*15:03L
KEMYLKLRSDVL

SEQ ID NO: 21624 - protein, 11 aa, Severe acute respiratory syndrome coronavirus 2
  REGION 1..11: note = Table B: HLA-DRB1*14:01L
LPLTQYNRYLA

SEQ ID NO: 21625 - protein, 10 aa, Severe acute respiratory syndrome coronavirus 2
  REGION 1..10: note = Table B: HLA-DRB1*14:01L HLA-DRB1*15:03L
LALYNKYKYF

SEQ ID NO: 21626 - protein, 18 aa, Severe acute respiratory syndrome coronavirus 2
  REGION 1..18: note = Table B: HLA-DRB1*14:01L
QPPQTSITSAVLQSGFRK

SEQ ID NO: 21627 - protein, 12 aa, Severe acute respiratory syndrome coronavirus 2
  REGION 1..12: note = Table B: HLA-DRB1*14:01L HLA-DRB1*15:03L
TSAVLQSGFRKM

SEQ ID NO: 21628 - protein, 11 aa, Severe acute respiratory syndrome coronavirus 2
  REGION 1..11: note = Table B: HLA-DRB1*14:01L
DDVVYCPRHVI

SEQ ID NO: 21629 - protein, 12 aa, Severe acute respiratory syndrome coronavirus 2
  REGION 1..12: note = Table B: HLA-DRB1*14:01L
EDLLIRKSNHNF

SEQ ID NO: 21630 - protein, 10 aa, Severe acute respiratory syndrome coronavirus 2
  REGION 1..10: note = Table B: HLA-DRB1*14:01L
LIRKSNHNFL

SEQ ID NO: 21631 - protein, 14 aa, Severe acute respiratory syndrome coronavirus 2
  REGION 1..14: note = Table B: HLA-DRB1*14:01L HLA-DRB1*11:04L HLA-DPA1*03:01-B1*105:01L HLA-DQA1*05:05-B1*03:01L
QDHVDILGPLSAQT

SEQ ID NO: 21632 - protein, 12 aa, Severe acute respiratory syndrome coronavirus 2
  REGION 1..12: note = Table B: HLA-DRB1*14:01L
GVTFQSAVKRTI

SEQ ID NO: 21633 - protein, 11 aa, Severe acute respiratory syndrome coronavirus 2
  REGION 1..11: note = Table B: HLA-DRB1*14:01L
RTIKGTHHWLL

SEQ ID NO: 21634 - protein, 12 aa, Severe acute respiratory syndrome coronavirus 2
  REGION 1..12: note = Table B: HLA-DRB1*14:01L HLA-DRB1*12:01L HLA-DRB1*15:03L
FAMMFVKHKHAF

SEQ ID NO: 21635 - protein, 11 aa, Severe acute respiratory syndrome coronavirus 2
  REGION 1..11: note = Table B: HLA-DRB1*14:01L HLA-DPA1*01:03-B1*104:01L HLA-DRB1*15:03L
MVDTSLSGFKL

SEQ ID NO: 21636 - protein, 15 aa, Severe acute respiratory syndrome coronavirus 2
  REGION 1..15: note = Table B: HLA-DRB1*14:01L HLA-DRB1*12:01L
LSGFKLKDCVMYASA

SEQ ID NO: 21637 - protein, 11 aa, Severe acute respiratory syndrome coronavirus 2
  REGION 1..11: note = Table B: HLA-DRB1*14:01L
VLTLVYKVYYG

SEQ ID NO: 21638 - protein, 13 aa, Severe acute respiratory syndrome coronavirus 2
  REGION 1..13: note = Table B: HLA-DRB1*14:01L
DSEVVLKKLKKSL

SEQ ID NO: 21639 - protein, 12 aa, Severe acute respiratory syndrome coronavirus 2
  REGION 1..12: note = Table B: HLA-DRB1*14:01L
AMTQMYKQARSE

SEQ ID NO: 21640 - protein, 12 aa, Severe acute respiratory syndrome coronavirus 2
  REGION 1..12: note = Table B: HLA-DRB1*14:01L
LNNIINNARDGC

SEQ ID NO: 21641 - protein, 12 aa, Severe acute respiratory syndrome coronavirus 2
  REGION 1..12: note = Table B: HLA-DRB1*14:01L HLA-DRB1*15:03L
NIINNARDGCVP

SEQ ID NO: 21642 - protein, 12 aa, Severe acute respiratory syndrome coronavirus 2
  REGION 1..12: note = Table B: HLA-DRB1*14:01L
IINNARDGCVPL

SEQ ID NO: 21643 - protein, 15 aa, Severe acute respiratory syndrome coronavirus 2
  REGION 1..15: note = Table B: HLA-DRB1*14:01L HLA-DRB1*11:01L HLA-DRB1*08:02L
GTTFTYASALWEIQQ

SEQ ID NO: 21644 - protein, 13 aa, Severe acute respiratory syndrome coronavirus 2
  REGION 1..13: note = Table B: HLA-DRB1*14:01L
EISMDNSPNLAWP

SEQ ID NO: 21645 - protein, 11 aa, Severe acute respiratory syndrome coronavirus 2
  REGION 1..11: note = Table B: HLA-DRB1*14:01L
RANSAVKLQNN

SEQ ID NO: 21646 - protein, 15 aa, Severe acute respiratory syndrome coronavirus 2
  REGION 1..15: note = Table B: HLA-DRB1*14:01L
VLALLSDLQDLKWAR

SEQ ID NO: 21647 - protein, 12 aa, Severe acute respiratory syndrome coronavirus 2
  REGION 1..12: note = Table B: HLA-DRB1*14:01L
IKGLNNLNRGMV

SEQ ID NO: 21648 - protein, 11 aa, Severe acute respiratory syndrome coronavirus 2
  REGION 1..11: note = Table B: HLA-DRB1*14:01L
GLNNLNRGMVL

SEQ ID NO: 21649 - protein, 11 aa, Severe acute respiratory syndrome coronavirus 2
  REGION 1..11: note = Table B: HLA-DRB1*14:01L
LNNLNRGMVLG

SEQ ID NO: 21650 - protein, 11 aa, Severe acute respiratory syndrome coronavirus 2
  REGION 1..11: note = Table B: HLA-DRB1*14:01L HLA-DRB1*14:54L
GSLAATVRLQA

SEQ ID NO: 21651 - protein, 12 aa, Severe acute respiratory syndrome coronavirus 2
  REGION 1..12: note = Table B: HLA-DRB1*14:01L
YFVVKRHTFSNY

SEQ ID NO: 21652 - protein, 12 aa, Severe acute respiratory syndrome coronavirus 2
  REGION 1..12: note = Table B: HLA-DRB1*14:01L
MADLVYALRHFD

SEQ ID NO: 21653 - protein, 13 aa, Severe acute respiratory syndrome coronavirus 2
  REGION 1..13: note = Table B: HLA-DRB1*14:01L HLA-DRB1*11:04L HLA-DRB1*08:01L HLA-DRB1*15:01L
PDILRVYANLGER

SEQ ID NO: 21654 - protein, 13 aa, Severe acute respiratory syndrome coronavirus 2
  REGION 1..13: note = Table B: HLA-DRB1*14:01L
TKPYIKWDLLKYD

SEQ ID NO: 21655 - protein, 12 aa, Severe acute respiratory syndrome coronavirus 2
  REGION 1..12: note = Table B: HLA-DRB1*14:01L HLA-DRB1*16:01L
ERLKLFDRYFKY

SEQ ID NO: 21656 - protein, 12 aa, Severe acute respiratory syndrome coronavirus 2
  REGION 1..12: note = Table B: HLA-DRB1*14:01L
PFVVSTGYHFRE

SEQ ID NO: 21657 - protein, 13 aa, Severe acute respiratory syndrome coronavirus 2
  REGION 1..13: note = Table B: HLA-DRB1*14:01L HLA-DRB1*12:01L
QDVNLHSSRLSFK

SEQ ID NO: 21658 - protein, 11 aa, Severe acute respiratory syndrome coronavirus 2
  REGION 1..11: note = Table B: HLA-DRB1*14:01L
GNLLLDKRTTC

SEQ ID NO: 21659 - protein, 15 aa, Severe acute respiratory syndrome coronavirus 2
  REGION 1..15: note = Table B: HLA-DRB1*14:01L
EGSSVELKHFFFAQD

SEQ ID NO: 21660 - protein, 11 aa, Severe acute respiratory syndrome coronavirus 2
  REGION 1..11: note = Table B: HLA-DRB1*14:01L
NNLDKSAGFPF

SEQ ID NO: 21661 - protein, 11 aa, Severe acute respiratory syndrome coronavirus 2
  REGION 1..11: note = Table B: HLA-DRB1*14:01L
FPFNKWGKARL

SEQ ID NO: 21662 - protein, 12 aa, Severe acute respiratory syndrome coronavirus 2
  REGION 1..12: note = Table B: HLA-DRB1*14:01L HLA-DRB1*14:54L
DALFAYTKRNVI

SEQ ID NO: 21663 - protein, 13 aa, Severe acute respiratory syndrome coronavirus 2
  REGION 1..13: note = Table B: HLA-DRB1*14:01L
MPNMLRIMASLVL

SEQ ID NO: 21664 - protein, 15 aa, Severe acute respiratory syndrome coronavirus 2
  REGION 1..15: note = Table B: HLA-DRB1*14:01L
MLRIMASLVLARKHT

SEQ ID NO: 21665 - protein, 11 aa, Severe acute respiratory syndrome coronavirus 2
  REGION 1..11: note = Table B: HLA-DRB1*14:01L
ASLVLARKHTT

SEQ ID NO: 21666 - protein, 11 aa, Severe acute respiratory syndrome coronavirus 2
  REGION 1..11: note = Table B: HLA-DRB1*14:01L HLA-DRB1*11:01L HLA-DRB1*04:08L
EFYAYLRKHFS

SEQ ID NO: 21667 - protein, 11 aa, Severe acute respiratory syndrome coronavirus 2
  REGION 1..11: note = Table B: HLA-DRB1*14:01L HLA-DQA1*03:01-B1*03:02L HLA-DRB1*16:01L
KSVLYYQNNVF

SEQ ID NO: 21668 - protein, 10 aa, Severe acute respiratory syndrome coronavirus 2
  REGION 1..10: note = Table B: HLA-DRB1*14:01L HLA-DRB1*12:01L HLA-DRB1*16:01L HLA-DRB1*15:03L
VISTSHKLVL

SEQ ID NO: 21669 - protein, 11 aa, Severe acute respiratory syndrome coronavirus 2
  REGION 1..11: note = Table B: HLA-DRB1*14:01L
YYCKSHKPPIS

SEQ ID NO: 21670 - protein, 10 aa, Severe acute respiratory syndrome coronavirus 2
  REGION 1..10: note = Table B: HLA-DRB1*14:01L
VTKNSKVQIG

SEQ ID NO: 21671 - protein, 13 aa, Severe acute respiratory syndrome coronavirus 2
  REGION 1..13: note = Table B: HLA-DRB1*14:01L HLA-DRB1*16:01L HLA-DRB1*15:03L
PTLVPQEHYVRIT

SEQ ID NO: 21672 - protein, 12 aa, Severe acute respiratory syndrome coronavirus 2
  REGION 1..12: note = Table B: HLA-DRB1*14:01L HLA-DRB1*16:01L
LVPQEHYVRITG

SEQ ID NO: 21673 - protein, 12 aa, Severe acute respiratory syndrome coronavirus 2
  REGION 1..12: note = Table B: HLA-DRB1*14:01L
LPIDKCSRIIPA

SEQ ID NO: 21674 - protein, 12 aa, Severe acute respiratory syndrome coronavirus 2
  REGION 1..12: note = Table B: HLA-DRB1*14:01L
ARVECFDKFKVN

SEQ ID NO: 21675 - protein, 12 aa, Severe acute respiratory syndrome coronavirus 2
  REGION 1..12: note = Table B: HLA-DRB1*14:01L HLA-DRB1*14:54L
KGVITHDVSSAI

SEQ ID NO: 21676 - protein, 15 aa, Severe acute respiratory syndrome coronavirus 2
  REGION 1..15: note = Table B: HLA-DRB1*14:01L HLA-DRB3*01:01L
VGILCIMSDRDLYDK

SEQ ID NO: 21677 - protein, 13 aa, Severe acute respiratory syndrome coronavirus 2
  REGION 1..13: note = Table B: HLA-DRB1*14:01L HLA-DRB1*08:01L
FTSLEIPRRNVAT

SEQ ID NO: 21678 - protein, 16 aa, Severe acute respiratory syndrome coronavirus 2
  REGION 1..16: note = Table B: HLA-DRB1*14:01L
SLEIPRRNVATLQAEN

SEQ ID NO: 21679 - protein, 12 aa, Severe acute respiratory syndrome coronavirus 2
  REGION 1..12: note = Table B: HLA-DRB1*14:01L HLA-DRB1*08:01L
TGLFKDCSKVIT

SEQ ID NO: 21680 - protein, 13 aa, Severe acute respiratory syndrome coronavirus 2
  REGION 1..13: note = Table B: HLA-DRB1*14:01L
PTHLSVDTKFKTE

SEQ ID NO: 21681 - protein, 12 aa, Severe acute respiratory syndrome coronavirus 2
  REGION 1..12: note = Table B: HLA-DRB1*14:01L HLA-DRB1*15:03L
GFKMNYQVNGYP

SEQ ID NO: 21682 - protein, 14 aa, Severe acute respiratory syndrome coronavirus 2
  REGION 1..14: note = Table B: HLA-DRB1*14:01L
NLVAVPTGYVDTPN

SEQ ID NO: 21683 - protein, 13 aa, Severe acute respiratory syndrome coronavirus 2
  REGION 1..13: note = Table B: HLA-DRB1*14:01L HLA-DPA1*01:03-B1*04:01L HLA-DRB1*16:01L
SDRVVFVLWAHGF

SEQ ID NO: 21684 - protein, 12 aa, Severe acute respiratory syndrome coronavirus 2
  REGION 1..12: note = Table B: HLA-DRB1*14:01L HLA-DRB1*08:01L HLA-DPA1*01:03-B1*02:01L
FVLWAHGFELTS

SEQ ID NO: 21685 - protein, 11 aa, Severe acute respiratory syndrome coronavirus 2
  REGION 1..11: note = Table B: HLA-DRB1*14:01L
KYFVKIGPERT

SEQ ID NO: 21686 - protein, 14 aa, Severe acute respiratory syndrome coronavirus 2
  REGION 1..14: note = Table B: HLA-DRB1*14:01L HLA-DRB1*12:01L HLA-DRB3*01:01L HLA-DPA1*02:01-B1*13:01L HLA-DRB1*15:03L
SNHDLYCQVHGNAH

SEQ ID NO: 21687 - protein, 13 aa, Severe acute respiratory syndrome coronavirus 2
  REGION 1..13: note = Table B: HLA-DRB1*14:01L HLA-DQA1*05:01-B1*02:01L HLA-DRB1*12:01L HLA-DRB1*16:01L HLA-DQA1*01:03-B1*06:01L HLA-DRB1*15:03L
DAQPCSDKAYKIE

SEQ ID NO: 21688 - protein, 13 aa, Severe acute respiratory syndrome coronavirus 2
  REGION 1..13: note = Table B: HLA-DRB1*14:01L HLA-DRB1*12:01L HLA-DRB1*04:08L
YSYATHSDKFTDG

SEQ ID NO: 21689 - protein, 12 aa, Severe acute respiratory syndrome coronavirus 2
  REGION 1..12: note = Table B: HLA-DRB1*14:01L HLA-DRB1*08:01L
GSLYVNKHAFHT

SEQ ID NO: 21690 - protein, 12 aa, Severe acute respiratory syndrome coronavirus 2
  REGION 1..12: note = Table B: HLA-DRB1*14:01L HLA-DRB1*08:01L
SLYVNKHAFHTP

SEQ ID NO: 21691 - protein, 12 aa, Severe acute respiratory syndrome coronavirus 2
  REGION 1..12: note = Table B: HLA-DRB1*14:01L
VNLKQLPFFYYS

SEQ ID NO: 21692 - protein, 12 aa, Severe acute respiratory syndrome coronavirus 2
  REGION 1..12: note = Table B: HLA-DRB1*14:01L HLA-DRB1*12:01L HLA-DRB1*04:08L HLA-DRB1*15:01L
VYKQFDTYNLWN

SEQ ID NO: 21693 - protein, 12 aa, Severe acute respiratory syndrome coronavirus 2
  REGION 1..12: note = Table B: HLA-DRB1*14:01L HLA-DRB1*08:01L
QSLENVAFNVVN

SEQ ID NO: 21694 - protein, 12 aa, Severe acute respiratory syndrome coronavirus 2
  REGION 1..12: note = Table B: HLA-DRB1*14:01L HLA-DRB1*11:01L
SLENVAFNVVNK

SEQ ID NO: 21695 - protein, 16 aa, Severe acute respiratory syndrome coronavirus 2
  REGION 1..16: note = Table B: HLA-DRB1*14:01L
LPVNVAFELWAKRNIK

SEQ ID NO: 21696 - protein, 11 aa, Severe acute respiratory syndrome coronavirus 2
  REGION 1..11: note = Table B: HLA-DRB1*14:01L
FELWAKRNIKP

SEQ ID NO: 21697 - protein, 12 aa, Severe acute respiratory syndrome coronavirus 2
  REGION 1..12: note = Table B: HLA-DRB1*14:01L HLA-DPA1*01:02-B1*04:01L HLA-DRB1*16:01L
NTVIWDYKRDAP

SEQ ID NO: 21698 - protein, 12 aa, Severe acute respiratory syndrome coronavirus 2
  REGION 1..12: note = Table B: HLA-DRB1*14:01L
IWDYKRDAPAHI

SEQ ID NO: 21699 - protein, 11 aa, Severe acute respiratory syndrome coronavirus 2
  REGION 1..11: note = Table B: HLA-DRB1*14:01L HLA-DPA1*01:02-B1*04:01L HLA-DRB1*16:01L
DLFRNARNGVL

SEQ ID NO: 21700 - protein, 14 aa, Severe acute respiratory syndrome coronavirus 2
  REGION 1..14: note = Table B: HLA-DRB1*14:01L HLA-DRB1*12:01L HLA-DPA1*02:01-B1*13:01L HLA-DQA1*01:03-B1*06:01L HLA-DRB1*15:03L
SRNLQEFKPRSQME

SEQ ID NO: 21701 - protein, 12 aa, Severe acute respiratory syndrome coronavirus 2
  REGION 1..12: note = Table B: HLA-DRB1*14:01L
DEFIERYKLEGY

SEQ ID NO: 21702 - protein, 12 aa, Severe acute respiratory syndrome coronavirus 2
  REGION 1..12: note = Table B: HLA-DRB1*14:01L
HLLIGLAKRFKE

SEQ ID NO: 21703 - protein, 13 aa, Severe acute respiratory syndrome coronavirus 2
  REGION 1..13: note = Table B: HLA-DRB1*14:01L
LIGLAKRFKESPF

SEQ ID NO: 21704 - protein, 11 aa, Severe acute respiratory syndrome coronavirus 2
  REGION 1..11: note = Table B: HLA-DRB1*14:01L
EIIKSQDLSVV

SEQ ID NO: 21705 - protein, 11 aa, Severe acute respiratory syndrome coronavirus 2
  REGION 1..11: note = Table B: HLA-DRB1*14:01L
VVSKVVKVTID

SEQ ID NO: 21706 - protein, 16 aa, Severe acute respiratory syndrome coronavirus 2
  REGION 1..16: note = Table B: HLA-DRB1*14:01L
SSQAWQPGVAMPNLYK

SEQ ID NO: 21707 - protein, 12 aa, Severe acute respiratory syndrome coronavirus 2
  REGION 1..12: note = Table B: HLA-DRB1*14:01L
MPNLYKMQRMLL

SEQ ID NO: 21708 - protein, 12 aa, Severe acute respiratory syndrome coronavirus 2
  REGION 1..12: note = Table B: HLA-DRB1*14:01L
PNLYKMQRMLLE

SEQ ID NO: 21709 - protein, 12 aa, Severe acute respiratory syndrome coronavirus 2
  REGION 1..12: note = Table B: HLA-DRB1*14:01L HLA-DRB1*12:01L
GSVAIKITEHSW

SEQ ID NO: 21710 - protein, 12 aa, Severe acute respiratory syndrome coronavirus 2
  REGION 1..12: note = Table B: HLA-DRB1*14:01L HLA-DPA1*02:01-B1*13:01L HLA-DQA1*05:05-B1*03:01L HLA-DPA1*01:02-B1*04:01L
EQIDGYVMHANY

SEQ ID NO: 21711 - protein, 12 aa, Severe acute respiratory syndrome coronavirus 2
  REGION 1..12: note = Table B: HLA-DRB1*14:01L HLA-DRB1*16:01L
TNPIQLSSYSLF

SEQ ID NO: 21712 - protein, 10 aa, Severe acute respiratory syndrome coronavirus 2
  REGION 1..10: note = Table B: HLA-DRB1*14:01L HLA-DRB1*15:03L
ILSLLSKGRL

SEQ ID NO: 21713 - protein, 13 aa, Severe acute respiratory syndrome coronavirus 2
  REGION 1..13: note = Table B: HLA-DRB1*14:01L
SKGRLIIRENNRV

SEQ ID NO: 21714 - protein, 10 aa, Severe acute respiratory syndrome coronavirus 2
  REGION 1..10: note = Table B: HLA-DRB1*14:01L HLA-DRB1*16:01L
IIRENNRVVI

SEQ ID NO: 21715 - protein, 17 aa, Severe acute respiratory syndrome coronavirus 2
  REGION 1..17: note = Table B: HLA-DRB1*14:01L
AIHVSGTNGTKRFDNPV

SEQ ID NO: 21716 - protein, 15 aa, Severe acute respiratory syndrome coronavirus 2
  REGION 1..15: note = Table B: HLA-DRB1*14:01L HLA-DRB1*14:02L HLA-DRB1*11:01L HLA-DRB1*08:03L
IIRGWIFGTTLDSKT

SEQ ID NO: 21717 - protein, 12 aa, Severe acute respiratory syndrome coronavirus 2
  REGION 1..12: note = Table B: HLA-DRB1*14:01L
TNVVIKVCEFQF

SEQ ID NO: 21718 - protein, 12 aa, Severe acute respiratory syndrome coronavirus 2
  REGION 1..12: note = Table B: HLA-DRB1*14:01L HLA-DRB1*08:01L HLA-DRB1*04:08L
LGVYYHKNNKSW

SEQ ID NO: 21719 - protein, 11 aa, Severe acute respiratory syndrome coronavirus 2
  REGION 1..11: note = Table B: HLA-DRB1*14:01L
VYYHKNNKSWM

SEQ ID NO: 21720 - protein, 12 aa, Severe acute respiratory syndrome coronavirus 2
  REGION 1..12: note = Table B: HLA-DRB1*14:01L
QGNFKNLREFVF

SEQ ID NO: 21721 - protein, 13 aa, Severe acute respiratory syndrome coronavirus 2
  REGION 1..13: note = Table B: HLA-DRB1*14:01L HLA-DRB1*08:01L HLA-DRB1*04:08L
FKNIDGYFKIYSK

SEQ ID NO: 21722 - protein, 10 aa, Severe acute respiratory syndrome coronavirus 2
  REGION 1..10: note = Table B: HLA-DRB1*14:01L
TLLALHRSYL

SEQ ID NO: 21723 - protein, 12 aa, Severe acute respiratory syndrome coronavirus 2
  REGION 1..12: note = Table B: HLA-DRB1*14:01L HLA-DQA1*01-B1*05L HLA-DRB1*15:03L
TFLLKYNENGTI

SEQ ID NO: 21724 - protein, 13 aa, Severe acute respiratory syndrome coronavirus 2
  REGION 1..13: note = Table B: HLA-DRB1*14:01L HLA-DRB1*11:01L
TRFASVYAWNRKR

SEQ ID NO: 21725 - protein, 11 aa, Severe acute respiratory syndrome coronavirus 2
  REGION 1..11: note = Table B: HLA-DRB1*14:01L
SVYAWNRKRIS

SEQ ID NO: 21726 - protein, 13 aa, Severe acute respiratory syndrome coronavirus 2
  REGION 1..13: note = Table B: HLA-DRB1*14:01L
FVIRGDEVRQIAP

SEQ ID NO: 21727 - protein, 17 aa, Severe acute respiratory syndrome coronavirus 2
  REGION 1..17: note = Table B: HLA-DRB1*14:01L
APGQTGKIADYNYKLPD

SEQ ID NO: 21728 - protein, 12 aa, Severe acute respiratory syndrome coronavirus 2
  REGION 1..12: note = Table B: HLA-DRB1*14:01L HLA-DRB1*16:01L HLA-DRB1*04:08L
GGNYNYLYRLFR

SEQ ID NO: 21729 - protein, 11 aa, Severe acute respiratory syndrome coronavirus 2
  REGION 1..11: note = Table B: HLA-DRB1*14:01L HLA-DQA1*01-B1*05L HLA-DPA1*02:01-B1*13:01L HLA-DQA1*03:01-B1*03:02L HLA-DRB1*16:01L HLA-DQA1*02:01-B1*03:03L
KPFERDISTEI

SEQ ID NO: 21730 - protein, 12 aa, Severe acute respiratory syndrome coronavirus 2
  REGION 1..12: note = Table B: HLA-DRB1*14:01L
VLTESNKKFLPF

SEQ ID NO: 21731 - protein, 14 aa, Severe acute respiratory syndrome coronavirus 2
  REGION 1..14: note = Table B: HLA-DRB1*14:01L HLA-DQA1*05:01-B1*02:01L
TESNKKFLPFQQFG

SEQ ID NO: 21732 - protein, 11 aa, Severe acute respiratory syndrome coronavirus 2
  REGION 1..11: note = Table B: HLA-DRB1*14:01L
DQLTPTWRVYS

SEQ ID NO: 21733 - protein, 11 aa, Severe acute respiratory syndrome coronavirus 2
  REGION 1..11: note = Table B: HLA-DRB1*14:01L HLA-DRB1*14:17L
AQVKQIYKTPP

SEQ ID NO: 21734 - protein, 12 aa, Severe acute respiratory syndrome coronavirus 2
  REGION 1..12: note = Table B: HLA-DRB1*14:01L HLA-DRB1*04:08L
IYKTPPIKDFGG

SEQ ID NO: 21735 - protein, 12 aa, Severe acute respiratory syndrome coronavirus 2
  REGION 1..12: note = Table B: HLA-DRB1*14:01L HLA-DRB1*12:01L HLA-DRB1*16:01L HLA-DRB1*15:03L
TPPIKDFGGFNF

SEQ ID NO: 21736 - protein, 11 aa, Severe acute respiratory syndrome coronavirus 2
  REGION 1..11: note = Table B: HLA-DRB1*14:01L HLA-DRB4*01:01L HLA-DRB1*10:01L
SFIEDLLFNKV

SEQ ID NO: 21737 - protein, 12 aa, Severe acute respiratory syndrome coronavirus 2
  REGION 1..12: note = Table B: HLA-DRB1*14:01L
IEDLLFNKVTLA

SEQ ID NO: 21738 - protein, 12 aa, Severe acute respiratory syndrome coronavirus 2
  REGION 1..12: note = Table B: HLA-DRB1*14:01L HLA-DRB1*15:03L
EDLLFNKVTLAD

SEQ ID NO: 21739 - protein, 12 aa, Severe acute respiratory syndrome coronavirus 2
  REGION 1..12: note = Table B: HLA-DRB1*14:01L HLA-DRB1*08:01L
ARDLICAQKFNG

SEQ ID NO: 21740 - protein, 14 aa, Severe acute respiratory syndrome coronavirus 2
  REGION 1..14: note = Table B: HLA-DRB1*14:01L
EMIAQYTSALLAGT

SEQ ID NO: 21741 - protein, 12 aa, Severe acute respiratory syndrome coronavirus 2
  REGION 1..12: note = Table B: HLA-DRB1*14:01L
QIPFAMQMAYRF

SEQ ID NO: 21742 - protein, 15 aa, Severe acute respiratory syndrome coronavirus 2
  REGION 1..15: note = Table B: HLA-DRB1*14:01L HLA-DRB1*14:02L
SSTASALGKLQDVVN

SEQ ID NO: 21743 - protein, 11 aa, Severe acute respiratory syndrome coronavirus 2
  REGION 1..11: note = Table B: HLA-DRB1*14:01L
ALNTLVKQLSS

SEQ ID NO: 21744 - protein, 11 aa, Severe acute respiratory syndrome coronavirus 2
  REGION 1..11: note = Table B: HLA-DRB1*14:01L
LNTLVKQLSSN

SEQ ID NO: 21745 - protein, 13 aa, Severe acute respiratory syndrome coronavirus 2
  REGION 1..13: note = Table B: HLA-DRB1*14:01L HLA-DRB1*08:01L
LNDILSRLDKVEA

SEQ ID NO: 21746 - protein, 12 aa, Severe acute respiratory syndrome coronavirus 2
  REGION 1..12: note = Table B: HLA-DRB1*14:01L HLA-DPA1*02:01-B1*13:01L HLA-DRB1*04:08L
LQTYVTQQLIRA

SEQ ID NO: 21747 - protein, 13 aa, Severe acute respiratory syndrome coronavirus 2
  REGION 1..13: note = Table B: HLA-DRB1*14:01L HLA-DRB1*12:01L HLA-DRB1*14:17L HLA-DRB1*16:01L
VTQQLIRAAEIRA

SEQ ID NO: 21748 - protein, 14 aa, Severe acute respiratory syndrome coronavirus 2
  REGION 1..14: note = Table B: HLA-DRB1*14:01L HLA-DRB1*12:01L HLA-DRB1*15:03L
APHGVVFLHVTYVP

SEQ ID NO: 21749 - protein, 12 aa, Severe acute respiratory syndrome coronavirus 2
  REGION 1..12: note = Table B: HLA-DRB1*14:01L HLA-DPA1*02:01-B1*13:01L
LHVTYVPAQEKN

SEQ ID NO: 21750 - protein, 11 aa, Severe acute respiratory syndrome coronavirus 2
  REGION 1..11: note = Table B: HLA-DRB1*14:01L
VTYVPAQEKNF

SEQ ID NO: 21751 - protein, 12 aa, Severe acute respiratory syndrome coronavirus 2
  REGION 1..12: note = Table B: HLA-DRB1*14:01L
VFVSNGTHWFVT

SEQ ID NO: 21752 - protein, 16 aa, Severe acute respiratory syndrome coronavirus 2
  REGION 1..16: note = Table B: HLA-DRB1*14:01L HLA-DRB1*11:02L HLA-DRB1*14:02L HLA-DRB4*01:01L HLA-DRB1*09:01L HLA-DRB3*01:01L HLA-DRB1*07:01L
VTQRNFYEPQIITTDN

SEQ ID NO: 21753 - protein, 13 aa, Severe acute respiratory syndrome coronavirus 2
  REGION 1..13: note = Table B: HLA-DRB1*14:01L HLA-DRB1*15:03L
TIGTVTLKQGEIK

SEQ ID NO: 21754 - protein, 17 aa, Severe acute respiratory syndrome coronavirus 2
  REGION 1..17: note = Table B: HLA-DRB1*14:01L
IGTVTLKQGEIKDATPS

SEQ ID NO: 21755 - protein, 10 aa, Severe acute respiratory syndrome coronavirus 2
  REGION 1..10: note = Table B: HLA-DRB1*14:01L HLA-DRB1*08:01L
KIITLKKRWQ

SEQ ID NO: 21756 - protein, 15 aa, Severe acute respiratory syndrome coronavirus 2
  REGION 1..15: note = Table B: HLA-DRB1*14:01L
GVVNPVMEPIYDEPT

SEQ ID NO: 21757 - protein, 11 aa, Severe acute respiratory syndrome coronavirus 2
  REGION 1..11: note = Table B: HLA-DRB1*14:01L HLA-DRB1*08:01L
FYVYSRVKNLN

SEQ ID NO: 21758 - protein, 12 aa, Severe acute respiratory syndrome coronavirus 2
  REGION 1..12: note = Table B: HLA-DRB1*14:01L
TITVEELKKLLE

SEQ ID NO: 21759 - protein, 12 aa, Severe acute respiratory syndrome coronavirus 2
  REGION 1..12: note = Table B: HLA-DRB1*14:01L HLA-DPA1*03:01-B1*105:01L
VEELKKLLEQWN

SEQ ID NO: 21760 - protein, 12 aa, Severe acute respiratory syndrome coronavirus 2
  REGION 1..12: note = Table B: HLA-DRB1*14:01L
RNRFLYIIKLIF

SEQ ID NO: 21761 - protein, 12 aa, Severe acute respiratory syndrome coronavirus 2
  REGION 1..12: note = Table B: HLA-DRB1*14:01L
LSYFIASFRLFA

SEQ ID NO: 21762 - protein, 11 aa, Severe acute respiratory syndrome coronavirus 2
  REGION 1..11: note = Table B: HLA-DRB1*14:01L HLA-DRB1*14:54L
TNILLNVPLHG

SEQ ID NO: 21763 - protein, 13 aa, Severe acute respiratory syndrome coronavirus 2
  REGION 1..13: note = Table B: HLA-DRB1*14:01L
IGAVILRGHLRIA

SEQ ID NO: 21764 - protein, 12 aa, Severe acute respiratory syndrome coronavirus 2
  REGION 1..12: note = Table B: HLA-DRB1*14:01L
DIKDLPKEITVA

SEQ ID NO: 21765 - protein, 15 aa, Severe acute respiratory syndrome coronavirus 2
  REGION 1..15: note = Table B: HLA-DRB1*14:01L HLA-DRB1*11:01L
TSRTLSYYKLGASQR

SEQ ID NO: 21766 - protein, 12 aa, Severe acute respiratory syndrome coronavirus 2
  REGION 1..12: note = Table B: HLA-DRB1*14:01L
DSGFAAYSRYRI

SEQ ID NO: 21767 - protein, 11 aa, Severe acute respiratory syndrome coronavirus 2
  REGION 1..11: note = Table B: HLA-DRB1*14:01L
GFAAYSRYRIG

SEQ ID NO: 21768 - protein, 10 aa, Severe acute respiratory syndrome coronavirus 2
  REGION 1..10: note = Table B: HLA-DRB1*14:01L HLA-DQA1*02:01-B1*03:03L HLA-DRB1*15:03L
LIIKNLSKSL

SEQ ID NO: 21769 - protein, 10 aa, Severe acute respiratory syndrome coronavirus 2
  REGION 1..10: note = Table B: HLA-DRB1*14:01L
IIKNLSKSLT

SEQ ID NO: 21770 - protein, 14 aa, Severe acute respiratory syndrome coronavirus 2
  REGION 1..14: note = Table B: HLA-DRB1*14:01L HLA-DRB1*08:01L
VKHVYQLRARSVSP

SEQ ID NO: 21771 - protein, 12 aa, Severe acute respiratory syndrome coronavirus 2
  REGION 1..12: note = Table B: HLA-DRB1*14:01L HLA-DRB1*15:03L
LPFTINCQEPKL

SEQ ID NO: 21772 - protein, 13 aa, Severe acute respiratory syndrome coronavirus 2
  REGION 1..13: note = Table B: HLA-DRB1*14:01L
GVPINTNSSPDDQ

SEQ ID NO: 21773 - protein, 13 aa, Severe acute respiratory syndrome coronavirus 2
  REGION 1..13: note = Table B: HLA-DRB1*14:01L HLA-DRB1*11:04L HLA-DRB1*11:01L HLA-DRB1*12:01L
IGYYRRATRRIRG

SEQ ID NO: 21774 - protein, 15 aa, Severe acute respiratory syndrome coronavirus 2
  REGION 1..15: note = Table B: HLA-DRB1*14:01L HLA-DRB1*11:04L
GYYRRATRRIRGGDG

SEQ ID NO: 21775 - protein, 11 aa, Severe acute respiratory syndrome coronavirus 2
  REGION 1..11: note = Table B: HLA-DRB1*14:01L
SAFFGMSRIGM

SEQ ID NO: 21776 - protein, 15 aa, Severe acute respiratory syndrome coronavirus 2
  REGION 1..15: note = Table B: HLA-DRB1*14:01L HLA-DRB1*11:04L HLA-DRB3*01:01L
DKDPNFKDQVILLNK

SEQ ID NO: 21777 - protein, 12 aa, Severe acute respiratory syndrome coronavirus 2
  REGION 1..12: note = Table B: HLA-DRB1*14:01L
ILLNKHIDAYKT

SEQ ID NO: 21778 - protein, 18 aa, Severe acute respiratory syndrome coronavirus 2
  REGION 1..18: note = Table B: HLA-DRB1*11:02L HLA-DQA1*05:05-B1*03:19L HLA-DPA1*01:03-B1*104:01L
LPQLEQPYVFIKRSDART

SEQ ID NO: 21779 - protein, 16 aa, Severe acute respiratory syndrome coronavirus 2
  REGION 1..16: note = Table B: HLA-DRB1*11:02L HLA-DQA1*05:05-B1*03:19L HLA-DPA1*02:01-B1*13:01L HLA-DQA1*05:05-B1*03:01L
EQPYVFIKRSDARTAP

SEQ ID NO: 21780 - protein, 17 aa, Severe acute respiratory syndrome coronavirus 2
  REGION 1..17: note = Table B: HLA-DRB1*11:02L
GGAYTRYVDNNFCGPDG

SEQ ID NO: 21781 - protein, 14 aa, Severe acute respiratory syndrome coronavirus 2
  REGION 1..14: note = Table B: HLA-DRB1*11:02L HLA-DRB4*01:01L HLA-DPA1*01:03-B1*02:01L HLA-DRB1*08:02L
SEKSYELQTPFEIK

SEQ ID NO: 21782 - protein, 16 aa, Severe acute respiratory syndrome coronavirus 2
  REGION 1..16: note = Table B: HLA-DRB1*11:02L HLA-DRB1*08:02L
VFPLNSIIKTIQPRVE

SEQ ID NO: 21783 - protein, 11 aa, Severe acute respiratory syndrome coronavirus 2
  REGION 1..11: note = Table B: HLA-DRB1*11:02L
GYLPQNAVVKI

SEQ ID NO: 21784 - protein, 14 aa, Severe acute respiratory syndrome coronavirus 2
  REGION 1..14: note = Table B: HLA-DRB1*11:02L HLA-DRB1*14:02L HLA-DQA1*05:05-B1*03:19L HLA-DRB1*08:02L
NLLEILQKEKVNIN

SEQ ID NO: 21785 - protein, 14 aa, Severe acute respiratory syndrome coronavirus 2
  REGION 1..14: note = Table B: HLA-DRB1*11:02L HLA-DPA1*01:03-B1*104:01L
IVGDFKLNEEIAII

SEQ ID NO: 21786 - protein, 15 aa, Severe acute respiratory syndrome coronavirus 2
  REGION 1..15: note = Table B: HLA-DRB1*11:02L HLA-DRB1*14:02L HLA-DRB1*08:02L
VKGLDYKAFKQIVES

SEQ ID NO: 21787 - protein, 11 aa, Severe acute respiratory syndrome coronavirus 2
  REGION 1..11: note = Table B: HLA-DRB1*11:02L
GEQKSILSPLY

SEQ ID NO: 21788 - protein, 15 aa, Severe acute respiratory syndrome coronavirus 2
  REGION 1..15: note = Table B: HLA-DRB1*11:02L HLA-DRB1*08:02L
LTNIFGTVYEKLKPV

SEQ ID NO: 21789 - protein, 15 aa, Severe acute respiratory syndrome coronavirus 2
  REGION 1..15: note = Table B: HLA-DRB1*11:02L HLA-DRB1*11:04L HLA-DRB3*01:01L
GTVYEKLKPVLDWLE

SEQ ID NO: 21790 - protein, 16 aa, Severe acute respiratory syndrome coronavirus 2
  REGION 1..16: note = Table B: HLA-DRB1*11:02L
IKESVQTFFKLVNKFL

SEQ ID NO: 21791 - protein, 15 aa, Severe acute respiratory syndrome coronavirus 2
  REGION 1..15: note = Table B: HLA-DRB1*11:02L HLA-DPA1*01:03-B1*104:01L HLA-DRB1*08:02L
SIIIGGAKLKALNLG

SEQ ID NO: 21792 - protein, 16 aa, Severe acute respiratory syndrome coronavirus 2
  REGION 1..16: note = Table B: HLA-DRB1*11:02L
TNNTFTLKGGAPTKVT

SEQ ID NO: 21793 - protein, 11 aa, Severe acute respiratory syndrome coronavirus 2
  REGION 1..11: note = Table B: HLA-DRB1*11:02L HLA-DQA1*01-B1*05L
GDDTVIEVQGY

SEQ ID NO: 21794 - protein, 16 aa, Severe acute respiratory syndrome coronavirus 2
  REGION 1..16: note = Table B: HLA-DRB1*11:02L HLA-DRB1*11:03L HLA-DRB3*01:01L
TEDDYQGKPLEFGATS

SEQ ID NO: 21795 - protein, 17 aa, Severe acute respiratory syndrome coronavirus 2
  REGION 1..17: note = Table B: HLA-DRB1*11:02L HLA-DPA1*01:03-B1*04:01L
KPLEFGATSAALQPEEE

SEQ ID NO: 21796 - protein, 14 aa, Severe acute respiratory syndrome coronavirus 2
  REGION 1..14: note = Table B: HLA-DRB1*11:02L HLA-DRB4*02:01NL HLA-DPA1*01:03-B1*02:01L HLA-DPA1*01:03-B1*104:01L
VAGALNKATNNAMQ

SEQ ID NO: 21797 - protein, 14 aa, Severe acute respiratory syndrome coronavirus 2
  REGION 1..14: note = Table B: HLA-DRB1*11:02L HLA-DRB1*11:03L HLA-DPA1*01:03-B1*02:01L
LAVFDKNLYDKLVS

SEQ ID NO: 21798 - protein, 14 aa, Severe acute respiratory syndrome coronavirus 2
  REGION 1..14: note = Table B: HLA-DRB1*11:02L HLA-DRB1*13:01L HLA-DRB1*08:03L
QKIAEIPKEEVKPF

SEQ ID NO: 21799 - protein, 18 aa, Severe acute respiratory syndrome coronavirus 2
  REGION 1..18: note = Table B: HLA-DRB1*11:02L HLA-DRB4*01:01L HLA-DPA1*01:03-B1*04:01L
IPKEEVKPFITESKPSVE

SEQ ID NO: 21800 - protein, 19 aa, Severe acute respiratory syndrome coronavirus 2
  REGION 1..19: note = Table B: HLA-DRB1*11:02L
HPDSATLVSDIDITFLKKD

SEQ ID NO: 21801 - protein, 20 aa, Severe acute respiratory syndrome coronavirus 2
  REGION 1..20: note = Table B: HLA-DRB1*11:02L
PDSATLVSDIDITFLKKDAP

SEQ ID NO: 21802 - protein, 18 aa, Severe acute respiratory syndrome coronavirus 2
  REGION 1..18: note = Table B: HLA-DRB1*11:02L
YPGQGLNGYTVEEAKTVL

SEQ ID NO: 21803 - protein, 14 aa, Severe acute respiratory syndrome coronavirus 2
  REGION 1..14: note = Table B: HLA-DRB1*11:02L HLA-DRB4*01:01L HLA-DPA1*01:03-B1*04:01L HLA-DPA1*01:03-B1*04:02L HLA-DPA1*02:01-B1*13:01L
ILPSIISNEKQEIL

SEQ ID NO: 21804 - protein, 15 aa, Severe acute respiratory syndrome coronavirus 2
  REGION 1..15: note = Table B: HLA-DRB1*11:02L HLA-DQA1*05:05-B1*03:116L HLA-DRB1*08:02L
EKQEILGTVSWNLRE

SEQ ID NO: 21805 - protein, 14 aa, Severe acute respiratory syndrome coronavirus 2
  REGION 1..14: note = Table B: HLA-DRB1*11:02L HLA-DRB1*08:02L
YFYTSKTTVASLIN

SEQ ID NO: 21806 - protein, 14 aa, Severe acute respiratory syndrome coronavirus 2
  REGION 1..14: note = Table B: HLA-DRB1*11:02L
SVYYTSNPTTFHLD

SEQ ID NO: 21807 - protein, 15 aa, Severe acute respiratory syndrome coronavirus 2
  REGION 1..15: note = Table B: HLA-DRB1*11:02L HLA-DRB1*14:02L HLA-DRB4*01:01L HLA-DPA1*01:03-B1*04:01L HLA-DRB1*09:01L HLA-DRB1*08:02L
LREVRTIKVFTTVDN

SEQ ID NO: 21808 - protein, 15 aa, Severe acute respiratory syndrome coronavirus 2
  REGION 1..15: note = Table B: HLA-DRB1*11:02L HLA-DRB4*01:01L HLA-DRB1*08:02L HLA-DRB1*15:01L
IKVFTTVDNINLHTQ

SEQ ID NO: 21809 - protein, 18 aa, Severe acute respiratory syndrome coronavirus 2
  REGION 1..18: note = Table B: HLA-DRB1*11:02L HLA-DPA1*01:03-B1*04:02L HLA-DRB1*08:02L
DGADVTKIKPHNSHEGKT

SEQ ID NO: 21810 - protein, 11 aa, Severe acute respiratory syndrome coronavirus 2
  REGION 1..11: note = Table B: HLA-DRB1*11:02L HLA-DRB1*12:01L
DDTLRVEAFEY

SEQ ID NO: 21811 - protein, 17 aa, Severe acute respiratory syndrome coronavirus 2
  REGION 1..17: note = Table B: HLA-DRB1*11:02L HLA-DRB1*11:03L
DTLRVEAFEYYHTTDPS

SEQ ID NO: 21812 - protein, 14 aa, Severe acute respiratory syndrome coronavirus 2
  REGION 1..14: note = Table B: HLA-DRB1*11:02L HLA-DRB1*11:03L HLA-DQA1*05:05-B1*03:116L HLA-DQA1*05:05-B1*03:01L
TLSYEQFKKGVQIP

SEQ ID NO: 21813 - protein, 18 aa, Severe acute respiratory syndrome coronavirus 2
  REGION 1..18: note = Table B: HLA-DRB1*11:02L
APPAQYELKHGTFTCASE

SEQ ID NO: 21814 - protein, 18 aa, Severe acute respiratory syndrome coronavirus 2
  REGION 1..18: note = Table B: HLA-DRB1*11:02L HLA-DPA1*01:03-B1*104:01L
YTGNYQCGHYKHITSKET

SEQ ID NO: 21815 - protein, 11 aa, Severe acute respiratory syndrome coronavirus 2
  REGION 1..11: note = Table B: HLA-DRB1*11:02L HLA-DRB1*10:01L HLA-DRB1*08:02L
EYKGPITDVFY

SEQ ID NO: 21816 - protein, 15 aa, Severe acute respiratory syndrome coronavirus 2
  REGION 1..15: note = Table B: HLA-DRB1*11:02L HLA-DRB5*01:01L HLA-DRB4*02:01NL HLA-DRB1*13:01L HLA-DRB1*15:01L
DNSYFTEQPIDLVPN

SEQ ID NO: 21817 - protein, 13 aa, Severe acute respiratory syndrome coronavirus 2
  REGION 1..13: note = Table B: HLA-DRB1*11:02L HLA-DRB4*02:01NL HLA-DPA1*01:03-B1*04:01L HLA-DPA1*01:03-B1*02:01L HLA-DRB1*08:02L
QPIDLVPNQPYPN

SEQ ID NO: 21818 - protein, 14 aa, Severe acute respiratory syndrome coronavirus 2
  REGION 1..14: note = Table B: HLA-DRB1*11:02L HLA-DRB1*08:02L
PIDLVPNQPYPNAS

SEQ ID NO: 21819 - protein, 13 aa, Severe acute respiratory syndrome coronavirus 2
  REGION 1..13: note = Table B: HLA-DRB1*11:02L HLA-DPA1*01:03-B1*104:01L
DLVPNQPYPNASF

SEQ ID NO: 21820 - protein, 19 aa, Severe acute respiratory syndrome coronavirus 2
  REGION 1..19: note = Table B: HLA-DRB1*11:02L HLA-DQA1*05:05-B1*03:19L
KPASRELKVTFFPDLNGDV

SEQ ID NO: 21821 - protein, 15 aa, Severe acute respiratory syndrome coronavirus 2
  REGION 1..15: note = Table B: HLA-DRB1*11:02L HLA-DRB1*15:01L
ELKVTFFPDLNGDVV

SEQ ID NO: 21822 - protein, 16 aa, Severe acute respiratory syndrome coronavirus 2
  REGION 1..16: note = Table B: HLA-DRB1*11:02L HLA-DPA1*01:03-B1*04:02L
IDYKHYTPSFKKGAKL

SEQ ID NO: 21823 - protein, 16 aa, Severe acute respiratory syndrome coronavirus 2
  REGION 1..16: note = Table B: HLA-DRB1*11:02L HLA-DRB1*14:02L HLA-DPA1*01:03-B1*04:02L HLA-DPA1*02:01-B1*13:01L HLA-DPA1*03:01-B1*105:01L HLA-DQA1*01:03-B1*06:01L HLA-DRB1*08:02L
TPSFKKGAKLLHKPIV

SEQ ID NO: 21824 - protein, 14 aa, Severe acute respiratory syndrome coronavirus 2
  REGION 1..14: note = Table B: HLA-DRB1*11:02L
LNKVVSTTTNIVTR

SEQ ID NO: 21825 - protein, 16 aa, Severe acute respiratory syndrome coronavirus 2
  REGION 1..16: note = Table B: HLA-DRB1*11:02L HLA-DPA1*01:03-B1*104:01L
MPTTIAKNTVKSVGKF

SEQ ID NO: 21826 - protein, 16 aa, Severe acute respiratory syndrome coronavirus 2
  REGION 1..16: note = Table B: HLA-DRB1*11:02L HLA-DRB1*08:02L
ASFNYLKSPNFSKLIN

SEQ ID NO: 21827 - protein, 13 aa, Severe acute respiratory syndrome coronavirus 2
  REGION 1..13: note = Table B: HLA-DRB1*11:02L
GSTFISDEVARDL

SEQ ID NO: 21828 - protein, 14 aa, Severe acute respiratory syndrome coronavirus 2
  REGION 1..14: note = Table B: HLA-DRB1*11:02L HLA-DPA1*01:03-B1*02:01L
TFISDEVARDLSLQ

SEQ ID NO: 21829 - protein, 16 aa, Severe acute respiratory syndrome coronavirus 2
  REGION 1..16: note = Table B: HLA-DRB1*11:02L HLA-DRB1*14:02L HLA-DPA1*01:03-B1*04:02L
RDLSLQFKRPINPTDQ

SEQ ID NO: 21830 - protein, 16 aa, Severe acute respiratory syndrome coronavirus 2
  REGION 1..16: note = Table B: HLA-DRB1*11:02L HLA-DPA1*01:03-B1*04:01L HLA-DQA1*05:05-B1*03:116L HLA-DPA1*01:03-B1*02:01L HLA-DRB1*08:02L
SSYIVDSVTVKNGSIH

SEQ ID NO: 21831 - protein, 15 aa, Severe acute respiratory syndrome coronavirus 2
  REGION 1..15: note = Table B: HLA-DRB1*11:02L HLA-DRB1*13:01L HLA-DRB1*10:01L
NGSIHLYFDKAGQKT

SEQ ID NO: 21832 - protein, 18 aa, Severe acute respiratory syndrome coronavirus 2
  REGION 1..18: note = Table B: HLA-DRB1*11:02L
LDQALVSDVGDSAEVAVK

SEQ ID NO: 21833 - protein, 11 aa, Severe acute respiratory syndrome coronavirus 2
  REGION 1..11: note = Table B: HLA-DRB1*11:02L HLA-DRB1*08:02L
AEVAVKMFDAY

SEQ ID NO: 21834 - protein, 12 aa, Severe acute respiratory syndrome coronavirus 2
  REGION 1..12: note = Table B: HLA-DRB1*11:02L HLA-DRB1*09:01L HLA-DRB3*01:01L HLA-DPA1*01:03-B1*02:01L HLA-DPA1*01:03-B1*104:01L HLA-DRB1*08:02L HLA-DRB1*08:03L
TFISAARQGFVD

SEQ ID NO: 21835 - protein, 15 aa, Severe acute respiratory syndrome coronavirus 2
  REGION 1..15: note = Table B: HLA-DRB1*11:02L HLA-DRB1*11:03L HLA-DQA1*05:05-B1*03:19L HLA-DPA1*01:03-B1*02:01L HLA-DRB1*08:02L
TKDVVECLKLSHQSD

SEQ ID NO: 21836 - protein, 15 aa, Severe acute respiratory syndrome coronavirus 2
  REGION 1..15: note = Table B: HLA-DRB1*11:02L HLA-DRB1*11:03L HLA-DRB1*10:01L HLA-DRB1*08:03L
ALIWNVKDFMSLSEQ

SEQ ID NO: 21837 - protein, 17 aa, Severe acute respiratory syndrome coronavirus 2
  REGION 1..17: note = Table B: HLA-DRB1*11:02L
LSEQLRKQIRSAAKKNN

SEQ ID NO: 21838 - protein, 15 aa, Severe acute respiratory syndrome coronavirus 2
  REGION 1..15: note = Table B: HLA-DRB1*11:02L HLA-DRB1*08:03L
RKQIRSAAKKNNLPF

SEQ ID NO: 21839 - protein, 16 aa, Severe acute respiratory syndrome coronavirus 2
  REGION 1..16: note = Table B: HLA-DRB1*11:02L
VGNICYTPSKLIEYTD

SEQ ID NO: 21840 - protein, 16 aa, Severe acute respiratory syndrome coronavirus 2
  REGION 1..16: note = Table B: HLA-DRB1*11:02L
RWVLNNDYYRSLPGVF

SEQ ID NO: 21841 - protein, 16 aa, Severe acute respiratory syndrome coronavirus 2
  REGION 1..16: note = Table B: HLA-DRB1*11:02L HLA-DRB1*11:04L HLA-DRB1*09:01L
NNDYYRSLPGVFCGVD

SEQ ID NO: 21842 - protein, 15 aa, Severe acute respiratory syndrome coronavirus 2
  REGION 1..15: note = Table B: HLA-DRB1*11:02L HLA-DRB4*01:01L
TNMFTPLIQPIGALD

SEQ ID NO: 21843 - protein, 16 aa, Severe acute respiratory syndrome coronavirus 2
  REGION 1..16: note = Table B: HLA-DRB1*11:02L HLA-DRB1*14:02L
LAYYFMRFRRAFGEYS

SEQ ID NO: 21844 - protein, 13 aa, Severe acute respiratory syndrome coronavirus 2
  REGION 1..13: note = Table B: HLA-DRB1*11:02L
IAYIICISTKHFY

SEQ ID NO: 21845 - protein, 16 aa, Severe acute respiratory syndrome coronavirus 2
  REGION 1..16: note = Table B: HLA-DRB1*11:02L HLA-DQA1*05:05-B1*03:01L HLA-DRB1*10:01L
STKHFYWFFSNYLKRR

SEQ ID NO: 21846 - protein, 16 aa, Severe acute respiratory syndrome coronavirus 2
  REGION 1..16: note = Table B: HLA-DRB1*11:02L HLA-DRB1*14:02L HLA-DRB1*08:02L HLA-DRB1*08:03L
QSGFRKMAFPSGKVEG

SEQ ID NO: 21847 - protein, 16 aa, Severe acute respiratory syndrome coronavirus 2
  REGION 1..16: note = Table B: HLA-DRB1*11:02L HLA-DRB4*01:01L HLA-DQA1*01:03-B1*06:01L
LNGLWLDDVVYCPRHV

SEQ ID NO: 21848 - protein, 17 aa, Severe acute respiratory syndrome coronavirus 2
  REGION 1..17: note = Table B: HLA-DRB1*11:02L HLA-DRB1*14:02L HLA-DPA1*01:03-B1*104:01L HLA-DRB1*08:02L
NPNYEDLLIRKSNHNFL

SEQ ID NO: 21849 - protein, 15 aa, Severe acute respiratory syndrome coronavirus 2
  REGION 1..15: note = Table B: HLA-DRB1*11:02L
SNHNFLVQAGNVQLR

SEQ ID NO: 21850 - protein, 16 aa, Severe acute respiratory syndrome coronavirus 2
  REGION 1..16: note = Table B: HLA-DRB1*11:02L
HNFLVQAGNVQLRVIG

SEQ ID NO: 21851 - protein, 11 aa, Severe acute respiratory syndrome coronavirus 2
  REGION 1..11: note = Table B: HLA-DRB1*11:02L
VDTANPKTPKY

SEQ ID NO: 21852 - protein, 16 aa, Severe acute respiratory syndrome coronavirus 2
  REGION 1..16: note = Table B: HLA-DRB1*11:02L HLA-DRB4*01:01L HLA-DQA1*05:05-B1*03:116L HLA-DRB1*09:01L HLA-DRB1*10:01L HLA-DRB1*08:02L HLA-DRB1*08:03L
DRWFLNRFTTTLNDFN

SEQ ID NO: 21853 - protein, 15 aa, Severe acute respiratory syndrome coronavirus 2
  REGION 1..15: note = Table B: HLA-DRB1*11:02L HLA-DRB1*08:02L
EDEFTPFDVVRQCSG

SEQ ID NO: 21854 - protein, 14 aa, Severe acute respiratory syndrome coronavirus 2
  REGION 1..14: note = Table B: HLA-DRB1*11:02L HLA-DRB1*13:01L HLA-DPA1*02:01-B1*13:01L
AFAMMFVKHKHAFL

SEQ ID NO: 21855 - protein, 16 aa, Severe acute respiratory syndrome coronavirus 2
  REGION 1..16: note = Table B: HLA-DRB1*11:02L
LSVLQQLRVESSSKLW

SEQ ID NO: 21856 - protein, 14 aa, Severe acute respiratory syndrome coronavirus 2
  REGION 1..14: note = Table B: HLA-DRB1*11:02L HLA-DRB3*01:01L HLA-DPA1*01:03-B1*104:01L
LPSYAAFATAQEAY

SEQ ID NO: 21857 - protein, 15 aa, Severe acute respiratory syndrome coronavirus 2
  REGION 1..15: note = Table B: HLA-DRB1*11:02L HLA-DRB1*13:01L HLA-DRB1*08:02L
GDSEVVLKKLKKSLN

SEQ ID NO: 21858 - protein, 17 aa, Severe acute respiratory syndrome coronavirus 2
  REGION 1..17: note = Table B: HLA-DRB1*11:02L
VAKSEFDRDAAMQRKLE

SEQ ID NO: 21859 - protein, 15 aa, Severe acute respiratory syndrome coronavirus 2
  REGION 1..15: note = Table B: HLA-DRB1*11:02L HLA-DRB1*14:02L
TMLFTMLRKLDNDAL

SEQ ID NO: 21860 - protein, 15 aa, Severe acute respiratory syndrome coronavirus 2
  REGION 1..15: note = Table B: HLA-DRB1*11:02L HLA-DPA1*01:03-B1*02:01L
IQQVVDADSKIVQLS

SEQ ID NO: 21861 - protein, 16 aa, Severe acute respiratory syndrome coronavirus 2
  REGION 1..16: note = Table B: HLA-DRB1*11:02L HLA-DRB1*13:01L HLA-DPA1*01:03-B1*02:01L HLA-DRB1*08:02L
SKIVQLSEISMDNSPN

SEQ ID NO: 21862 - protein, 13 aa, Severe acute respiratory syndrome coronavirus 2
  REGION 1..13: note = Table B: HLA-DRB1*11:02L HLA-DRB1*04:10L HLA-DRB1*09:01L HLA-DPA1*03:01-B1*105:01L HLA-DRB1*08:03L
TALRANSAVKLQN

SEQ ID NO: 21863 - protein, 14 aa, Severe acute respiratory syndrome coronavirus 2
  REGION 1..14: note = Table B: HLA-DRB1*11:02L HLA-DPA1*01:03-B1*02:01L
NALAYYNTTKGGRF

SEQ ID NO: 21864 - protein, 13 aa, Severe acute respiratory syndrome coronavirus 2
  REGION 1..13: note = Table B: HLA-DRB1*11:02L HLA-DPA1*01:03-B1*02:01L HLA-DRB1*15:01L
LAYYNTTKGGRFV

SEQ ID NO: 21865 - protein, 16 aa, Severe acute respiratory syndrome coronavirus 2
  REGION 1..16: note = Table B: HLA-DRB1*11:02L
YLYFIKGLNNLNRGMV

SEQ ID NO: 21866 - protein, 16 aa, Severe acute respiratory syndrome coronavirus 2
  REGION 1..16: note = Table B: HLA-DRB1*11:02L HLA-DRB1*14:02L HLA-DPA1*01:03-B1*04:02L
IKGLNNLNRGMVLGSL

SEQ ID NO: 21867 - protein, 13 aa, Severe acute respiratory syndrome coronavirus 2
  REGION 1..13: note = Table B: HLA-DRB1*11:02L HLA-DQA1*05:05-B1*03:116L HLA-DPA1*01:03-B1*04:02L HLA-DRB3*01:01L HLA-DRB1*08:02L HLA-DRB1*15:03L
GSLAATVRLQAGN

SEQ ID NO: 21868 - protein, 12 aa, Severe acute respiratory syndrome coronavirus 2
  REGION 1..12: note = Table B: HLA-DRB1*11:02L HLA-DRB1*09:01L HLA-DRB1*07:01L
AFAVDAAKAYKD

SEQ ID NO: 21869 - protein, 13 aa, Severe acute respiratory syndrome coronavirus 2
  REGION 1..13: note = Table B: HLA-DRB1*11:02L HLA-DRB1*13:01L
YKDYLASGGQPIT

SEQ ID NO: 21870 - protein, 16 aa, Severe acute respiratory syndrome coronavirus 2
  REGION 1..16: note = Table B: HLA-DRB1*11:02L
TGQAITVTPEANMDQE

SEQ ID NO: 21871 - protein, 12 aa, Severe acute respiratory syndrome coronavirus 2
  REGION 1..12: note = Table B: HLA-DRB1*11:02L HLA-DQA1*01-B1*05L HLA-DPA1*01:03-B1*104:01L HLA-DRB1*16:01L
STDVVYRAFDIY

SEQ ID NO: 21872 - protein, 16 aa, Severe acute respiratory syndrome coronavirus 2
  REGION 1..16: note = Table B: HLA-DRB1*11:02L HLA-DRB4*01:01L HLA-DRB1*09:01L
DVVYRAFDIYNDKVAG

SEQ ID NO: 21873 - protein, 16 aa, Severe acute respiratory syndrome coronavirus 2
  REGION 1..16: note = Table B: HLA-DRB1*11:02L HLA-DRB1*14:02L
DDNLIDSYFVVKRHTF

SEQ ID NO: 21874 - protein, 16 aa, Severe acute respiratory syndrome coronavirus 2
  REGION 1..16: note = Table B: HLA-DRB1*11:02L HLA-DQA1*05:05-B1*03:19L HLA-DQA1*05:01-B1*02:01L HLA-DPA1*01:03-B1*104:01L
DNLIDSYFVVKRHTFS

SEQ ID NO: 21875 - protein, 13 aa, Severe acute respiratory syndrome coronavirus 2
  REGION 1..13: note = Table B: HLA-DRB1*11:02L HLA-DRB1*14:02L HLA-DQA1*05:05-B1*03:116L HLA-DRB1*08:02L
DSYFVVKRHTFSN

SEQ ID NO: 21876 - protein, 15 aa, Severe acute respiratory syndrome coronavirus 2
  REGION 1..15: note = Table B: HLA-DRB1*11:02L HLA-DRB1*11:01L HLA-DRB3*01:01L
RHTFSNYQHEETIYN

SEQ ID NO: 21877 - protein, 16 aa, Severe acute respiratory syndrome coronavirus 2
  REGION 1..16: note = Table B: HLA-DRB1*11:02L HLA-DPA1*01:03-B1*104:01L
TIYNLLKDCPAVAKHD

SEQ ID NO: 21878 - protein, 14 aa, Severe acute respiratory syndrome coronavirus 2
  REGION 1..14: note = Table B: HLA-DRB1*11:02L HLA-DPA1*02:01-B1*13:01L HLA-DRB1*08:02L HLA-DRB1*15:03L
MADLVYALRHFDEG

SEQ ID NO: 21879 - protein, 14 aa, Severe acute respiratory syndrome coronavirus 2
  REGION 1..14: note = Table B: HLA-DRB1*11:02L HLA-DRB1*14:02L HLA-DQA1*05:05-B1*03:19L HLA-DPA1*01:03-B1*04:02L HLA-DQA1*05:05-B1*03:01L HLA-DRB1*08:02L
ADLVYALRHFDEGN

SEQ ID NO: 21880 - protein, 12 aa, Severe acute respiratory syndrome coronavirus 2
  REGION 1..12: note = Table B: HLA-DRB1*11:02L HLA-DRB1*14:02L HLA-DQA1*05:05-B1*03:116L HLA-DPA1*01:03-B1*04:02L HLA-DRB1*12:01L
TLDNQDLNGNWY

SEQ ID NO: 21881 - protein, 16 aa, Severe acute respiratory syndrome coronavirus 2
  REGION 1..16: note = Table B: HLA-DRB1*11:02L
DFGDFIQTTPGSGVPV

SEQ ID NO: 21882 - protein, 16 aa, Severe acute respiratory syndrome coronavirus 2
  REGION 1..16: note = Table B: HLA-DRB1*11:02L HLA-DPA1*01:03-B1*04:01L
GDFIQTTPGSGVPVVD

SEQ ID NO: 21883 - protein, 18 aa, Severe acute respiratory syndrome coronavirus 2
  REGION 1..18: note = Table B: HLA-DRB1*11:02L
TKPYIKWDLLKYDFTEER

SEQ ID NO: 21884 - protein, 12 aa, Severe acute respiratory syndrome coronavirus 2
  REGION 1..12: note = Table B: HLA-DRB1*11:02L HLA-DRB1*12:01L HLA-DPA1*01:03-B1*104:01L
FTEERLKLFDRY

SEQ ID NO: 21885 - protein, 19 aa, Severe acute respiratory syndrome coronavirus 2
  REGION 1..19: note = Table B: HLA-DRB1*11:02L HLA-DRB1*14:02L HLA-DRB1*08:03L
PPTSFGPLVRKIFVDGVPF

SEQ ID NO: 21886 - protein, 15 aa, Severe acute respiratory syndrome coronavirus 2
  REGION 1..15: note = Table B: HLA-DRB1*11:02L HLA-DPA1*01:03-B1*02:01L
VPFVVSTGYHFRELG

SEQ ID NO: 21887 - protein, 15 aa, Severe acute respiratory syndrome coronavirus 2
  REGION 1..15: note = Table B: HLA-DRB1*11:02L HLA-DRB1*09:01L HLA-DPA1*01:03-B1*02:01L
YHFRELGVVHNQDVN

SEQ ID NO: 21888 - protein, 16 aa, Severe acute respiratory syndrome coronavirus 2
  REGION 1..16: note = Table B: HLA-DRB1*11:02L HLA-DRB1*11:03L HLA-DRB1*14:02L HLA-DRB1*07:01L HLA-DRB1*08:02L HLA-DRB1*08:03L
SRLSFKELLVYAADPA

SEQ ID NO: 21889 - protein, 14 aa, Severe acute respiratory syndrome coronavirus 2
  REGION 1..14: note = Table B: HLA-DRB1*11:02L HLA-DRB1*11:01L HLA-DPA1*01:03-B1*02:01L
FKELLVYAADPAMH

SEQ ID NO: 21890 - protein, 13 aa, Severe acute respiratory syndrome coronavirus 2
  REGION 1..13: note = Table B: HLA-DRB1*11:02L HLA-DPA1*01:03-B1*04:01L HLA-DPA1*01:03-B1*104:01L
LLVYAADPAMHAA

SEQ ID NO: 21891 - protein, 13 aa, Severe acute respiratory syndrome coronavirus 2
  REGION 1..13: note = Table B: HLA-DRB1*11:02L HLA-DRB4*02:01NL HLA-DPA1*01:03-B1*104:01L HLA-DRB1*08:02L HLA-DRB1*15:01L
LVYAADPAMHAAS

SEQ ID NO: 21892 - protein, 16 aa, Severe acute respiratory syndrome coronavirus 2
  REGION 1..16: note = Table B: HLA-DRB1*11:02L HLA-DRB1*08:03L
KDFYDFAVSKGFFKEG

SEQ ID NO: 21893 - protein, 15 aa, Severe acute respiratory syndrome coronavirus 2
  REGION 1..15: note = Table B: HLA-DRB1*11:02L HLA-DPA1*01:03-B1*04:02L HLA-DPA1*01:03-B1*104:01L HLA-DRB1*08:02L
LKHFFFAQDGNAAIS

SEQ ID NO: 21894 - protein, 14 aa, Severe acute respiratory syndrome coronavirus 2
  REGION 1..14: note = Table B: HLA-DRB1*11:02L HLA-DRB1*08:01L HLA-DPA1*01:03-B1*04:02L HLA-DPA1*02:01-B1*13:01L HLA-DPA1*01:03-B1*104:01L HLA-DRB1*07:01L HLA-DQA1*01:03-B1*06:01L HLA-DRB1*08:02L
HFFFAQDGNAAISD

SEQ ID NO: 21895 - protein, 13 aa, Severe acute respiratory syndrome coronavirus 2
  REGION 1..13: note = Table B: HLA-DRB1*11:02L HLA-DPA1*01:03-B1*04:01L HLA-DRB1*15:01L
NQVIVNNLDKSAG

SEQ ID NO: 21896 - protein, 14 aa, Severe acute respiratory syndrome coronavirus 2
  REGION 1..14: note = Table B: HLA-DRB1*11:02L
QVIVNNLDKSAGFP

SEQ ID NO: 21897 - protein, 15 aa, Severe acute respiratory syndrome coronavirus 2
  REGION 1..15: note = Table B: HLA-DRB1*11:02L HLA-DRB1*14:02L
GFPFNKWGKARLYYD

SEQ ID NO: 21898 - protein, 18 aa, Severe acute respiratory syndrome coronavirus 2
  REGION 1..18: note = Table B: HLA-DRB1*11:02L
GKARLYYDSMSYEDQDAL

SEQ ID NO: 21899 - protein, 12 aa, Severe acute respiratory syndrome coronavirus 2
  REGION 1..12: note = Table B: HLA-DRB1*11:02L HLA-DRB1*13:01L HLA-DQA1*05:05-B1*03:116L
LFAYTKRNVIPT

SEQ ID NO: 21900 - protein, 14 aa, Severe acute respiratory syndrome coronavirus 2
  REGION 1..14: note = Table B: HLA-DRB1*11:02L HLA-DPA1*01:03-B1*104:01L
FAYTKRNVIPTITQ

SEQ ID NO: 21901 - protein, 13 aa, Severe acute respiratory syndrome coronavirus 2
  REGION 1..13: note = Table B: HLA-DRB1*11:02L HLA-DRB1*14:02L HLA-DQA1*05:05-B1*03:19L HLA-DQA1*05:05-B1*03:116L HLA-DPA1*01:03-B1*04:02L HLA-DQA1*05:05-B1*03:01L HLA-DRB1*08:02L
LKYAISAKNRART

SEQ ID NO: 21902 - protein, 11 aa, Severe acute respiratory syndrome coronavirus 2
  REGION 1..11: note = Table B: HLA-DRB1*11:02L
ATVVIGTSKFY

SEQ ID NO: 21903 - protein, 14 aa, Severe acute respiratory syndrome coronavirus 2
  REGION 1..14: note = Table B: HLA-DRB1*11:02L HLA-DRB1*13:01L
VNALLSTDGNKIAD

SEQ ID NO: 21904 - protein, 14 aa, Severe acute respiratory syndrome coronavirus 2
  REGION 1..14: note = Table B: HLA-DRB1*11:02L HLA-DRB1*13:01L HLA-DRB4*01:01L HLA-DPA1*01:03-B1*04:02L HLA-DRB1*08:02L
NALLSTDGNKIADK

SEQ ID NO: 21905 - protein, 17 aa, Severe acute respiratory syndrome coronavirus 2
  REGION 1..17: note = Table B: HLA-DRB1*11:02L
NLQHRLYECLYRNRDVD

SEQ ID NO: 21906 - protein, 15 aa, Severe acute respiratory syndrome coronavirus 2
  REGION 1..15: note = Table B: HLA-DRB1*11:02L HLA-DRB1*14:02L HLA-DQA1*05:05-B1*03:116L HLA-DRB1*08:02L
HRLYECLYRNRDVDT

SEQ ID NO: 21907 - protein, 14 aa, Severe acute respiratory syndrome coronavirus 2
  REGION 1..14: note = Table B: HLA-DRB1*11:02L HLA-DQA1*05:05-B1*03:116L
VNEFYAYLRKHFSM

SEQ ID NO: 21908 - protein, 15 aa, Severe acute respiratory syndrome coronavirus 2
  REGION 1..15: note = Table B: HLA-DRB1*11:02L
IKNFKSVLYYQNNVF

SEQ ID NO: 21909 - protein, 14 aa, Severe acute respiratory syndrome coronavirus 2
  REGION 1..14: note = Table B: HLA-DRB1*11:02L HLA-DRB1*11:03L HLA-DRB1*14:02L HLA-DRB1*08:01L HLA-DRB4*01:01L HLA-DPA1*01:03-B1*04:01L HLA-DRB1*09:01L HLA-DPA1*01:03-B1*02:01L HLA-DPA1*01:03-B1*104:01L HLA-DRB1*07:01L HLA-DRB1*10:01L
  REGION 1..14: note = CONT. FROM ABOVE: HLA-DRB1*08:03L
SVLYYQNNVFMSEA

SEQ ID NO: 21910 - protein, 15 aa, Severe acute respiratory syndrome coronavirus 2
  REGION 1..15: note = Table B: HLA-DRB1*11:02L
DGTLMIERFVSLAID

SEQ ID NO: 21911 - protein, 18 aa, Severe acute respiratory syndrome coronavirus 2
  REGION 1..18: note = Table B: HLA-DRB1*11:02L HLA-DRB4*01:01L HLA-DRB1*09:01L
DAYPLTKHPNQEYADVFH

SEQ ID NO: 21912 - protein, 15 aa, Severe acute respiratory syndrome coronavirus 2
  REGION 1..15: note = Table B: HLA-DRB1*11:02L HLA-DRB1*14:02L
HLYLQYIRKLHDELT

SEQ ID NO: 21913 - protein, 11 aa, Severe acute respiratory syndrome coronavirus 2
  REGION 1..11: note = Table B: HLA-DRB1*11:02L HLA-DRB1*08:02L
DELTGHMLDMY

SEQ ID NO: 21914 - protein, 15 aa, Severe acute respiratory syndrome coronavirus 2
  REGION 1..15: note = Table B: HLA-DRB1*11:02L HLA-DQA1*05:05-B1*03:19L HLA-DPA1*01:03-B1*04:02L
GGMSYYCKSHKPPIS

SEQ ID NO: 21915 - protein, 15 aa, Severe acute respiratory syndrome coronavirus 2
  REGION 1..15: note = Table B: HLA-DRB1*11:02L HLA-DRB1*14:02L HLA-DQA1*05:05-B1*03:19L HLA-DPA1*02:01-B1*13:01L
GQVFGLYKNTCVGSD

SEQ ID NO: 21916 - protein, 14 aa, Severe acute respiratory syndrome coronavirus 2
  REGION 1..14: note = Table B: HLA-DRB1*11:02L
AGDYILANTCTERL

SEQ ID NO: 21917 - protein, 15 aa, Severe acute respiratory syndrome coronavirus 2
  REGION 1..15: note = Table B: HLA-DRB1*11:02L HLA-DRB1*11:03L HLA-DRB1*09:01L HLA-DPA1*01:03-B1*104:01L HLA-DRB1*08:03L
ERLKLFAAETLKATE

SEQ ID NO: 21918 - protein, 15 aa, Severe acute respiratory syndrome coronavirus 2
  REGION 1..15: note = Table B: HLA-DRB1*11:02L HLA-DQA1*05:05-B1*03:116L
RLKLFAAETLKATEE

SEQ ID NO: 21919 - protein, 14 aa, Severe acute respiratory syndrome coronavirus 2
  REGION 1..14: note = Table B: HLA-DRB1*11:02L
TGYRVTKNSKVQIG

SEQ ID NO: 21920 - protein, 15 aa, Severe acute respiratory syndrome coronavirus 2
  REGION 1..15: note = Table B: HLA-DRB1*11:02L
GYRVTKNSKVQIGEY

SEQ ID NO: 21921 - protein, 14 aa, Severe acute respiratory syndrome coronavirus 2
  REGION 1..14: note = Table B: HLA-DRB1*11:02L HLA-DRB4*02:01NL HLA-DRB1*13:01L HLA-DPA1*01:03-B1*02:01L HLA-DRB1*08:02L HLA-DRB1*15:01L
IGEYTFEKGDYGDA

SEQ ID NO: 21922 - protein, 14 aa, Severe acute respiratory syndrome coronavirus 2
  REGION 1..14: note = Table B: HLA-DRB1*11:02L HLA-DQA1*01:01-B1*05:01L HLA-DRB1*04:10L HLA-DPA1*01:03-B1*02:01L HLA-DRB1*08:03L
DAVVYRGTTTYKLN

SEQ ID NO: 21923 - protein, 16 aa, Severe acute respiratory syndrome coronavirus 2
  REGION 1..16: note = Table B: HLA-DRB1*11:02L
TSHTVMPLSAPTLVPQ

SEQ ID NO: 21924 - protein, 15 aa, Severe acute respiratory syndrome coronavirus 2
  REGION 1..15: note = Table B: HLA-DRB1*11:02L
RIVYTACSHAAVDAL

SEQ ID NO: 21925 - protein, 16 aa, Severe acute respiratory syndrome coronavirus 2
  REGION 1..16: note = Table B: HLA-DRB1*11:02L HLA-DQA1*05:05-B1*03:116L
AKHYVYIGDPAQLPAP

SEQ ID NO: 21926 - protein, 14 aa, Severe acute respiratory syndrome coronavirus 2
  REGION 1..14: note = Table B: HLA-DRB1*11:02L HLA-DRB4*01:01L HLA-DPA1*01:03-B1*04:01L HLA-DRB1*15:01L
YVYIGDPAQLPAPR

SEQ ID NO: 21927 - protein, 14 aa, Severe acute respiratory syndrome coronavirus 2
  REGION 1..14: note = Table B: HLA-DRB1*11:02L HLA-DRB5*01:01L HLA-DQA1*05:05-B1*03:19L HLA-DPA1*01:03-B1*04:02L HLA-DRB1*07:01L HLA-DRB1*08:02L HLA-DRB1*15:01L
VSALVYDNKLKAHK

SEQ ID NO: 21928 - protein, 18 aa, Severe acute respiratory syndrome coronavirus 2
  REGION 1..18: note = Table B: HLA-DRB1*11:02L HLA-DRB1*14:02L
SAQCFKMFYKGVITHDVS

SEQ ID NO: 21929 - protein, 13 aa, Severe acute respiratory syndrome coronavirus 2
  REGION 1..13: note = Table B: HLA-DRB1*11:02L HLA-DPA1*01:03-B1*02:01L HLA-DPA1*01:03-B1*104:01L HLA-DRB1*08:02L HLA-DRB1*15:01L
KGVITHDVSSAIN

SEQ ID NO: 21930 - protein, 14 aa, Severe acute respiratory syndrome coronavirus 2
  REGION 1..14: note = Table B: HLA-DRB1*11:02L HLA-DPA1*01:03-B1*02:01L HLA-DPA1*01:03-B1*104:01L HLA-DRB1*08:02L HLA-DRB1*15:01L
GVITHDVSSAINRP

SEQ ID NO: 21931 - protein, 17 aa, Severe acute respiratory syndrome coronavirus 2
  REGION 1..17: note = Table B: HLA-DRB1*11:02L
NPAWRKAVFISPYNSQN

SEQ ID NO: 21932 - protein, 14 aa, Severe acute respiratory syndrome coronavirus 2
  REGION 1..14: note = Table B: HLA-DRB1*11:02L HLA-DQA1*05:05-B1*03:116L
ISPYNSQNAVASKI

SEQ ID NO: 21933 - protein, 16 aa, Severe acute respiratory syndrome coronavirus 2
  REGION 1..16: note = Table B: HLA-DRB1*11:02L HLA-DPA1*01:03-B1*04:01L HLA-DPA1*01:03-B1*04:02L
SKILGLPTQTVDSSQG

SEQ ID NO: 21934 - protein, 11 aa, Severe acute respiratory syndrome coronavirus 2
  REGION 1..11: note = Table B: HLA-DRB1*11:02L
VDSSQGSEYDY

SEQ ID NO: 21935 - protein, 14 aa, Severe acute respiratory syndrome coronavirus 2
  REGION 1..14: note = Table B: HLA-DRB1*11:02L HLA-DRB4*02:01NL HLA-DPA1*01:03-B1*04:01L HLA-DQA1*05:05-B1*03:116L HLA-DRB1*15:01L
DYVIFTQTTETAHS

SEQ ID NO: 21936 - protein, 17 aa, Severe acute respiratory syndrome coronavirus 2
  REGION 1..17: note = Table B: HLA-DRB1*11:02L
DKLQFTSLEIPRRNVAT

SEQ ID NO: 21937 - protein, 18 aa, Severe acute respiratory syndrome coronavirus 2
  REGION 1..18: note = Table B: HLA-DRB1*11:02L HLA-DRB1*14:02L HLA-DQA1*05:05-B1*03:19L HLA-DPA1*01:03-B1*04:02L
VTGLFKDCSKVITGLHPT

SEQ ID NO: 21938 - protein, 15 aa, Severe acute respiratory syndrome coronavirus 2
  REGION 1..15: note = Table B: HLA-DRB1*11:02L
KMNYQVNGYPNMFIT

SEQ ID NO: 21939 - protein, 16 aa, Severe acute respiratory syndrome coronavirus 2
  REGION 1..16: note = Table B: HLA-DRB1*11:02L
NYQVNGYPNMFITREE

SEQ ID NO: 21940 - protein, 16 aa, Severe acute respiratory syndrome coronavirus 2
  REGION 1..16: note = Table B: HLA-DRB1*11:02L HLA-DRB1*13:01L HLA-DPA1*01:03-B1*04:02L
YPNMFITREEAIRHVR

SEQ ID NO: 21941 - protein, 15 aa, Severe acute respiratory syndrome coronavirus 2
  REGION 1..15: note = Table B: HLA-DRB1*11:02L HLA-DRB1*11:01L HLA-DRB1*08:03L
DRVVFVLWAHGFELT

SEQ ID NO: 21942 - protein, 16 aa, Severe acute respiratory syndrome coronavirus 2
  REGION 1..16: note = Table B: HLA-DRB1*11:02L
VVFVLWAHGFELTSMK

SEQ ID NO: 21943 - protein, 17 aa, Severe acute respiratory syndrome coronavirus 2
  REGION 1..17: note = Table B: HLA-DRB1*11:02L HLA-DQA1*05:05-B1*03:19L HLA-DQA1*05:01-B1*02:01L
VQHMVVKAALLADKFPV

SEQ ID NO: 21944 - protein, 17 aa, Severe acute respiratory syndrome coronavirus 2
  REGION 1..17: note = Table B: HLA-DRB1*11:02L
VKAALLADKFPVLHDIG

SEQ ID NO: 21945 - protein, 14 aa, Severe acute respiratory syndrome coronavirus 2
  REGION 1..14: note = Table B: HLA-DRB1*11:02L HLA-DRB1*13:01L HLA-DQA1*05:05-B1*03:116L HLA-DRB1*08:02L HLA-DRB1*15:01L
TPAFDKSAFVNLKQ

SEQ ID NO: 21946 - protein, 13 aa, Severe acute respiratory syndrome coronavirus 2
  REGION 1..13: note = Table B: HLA-DRB1*11:02L HLA-DPA1*01:03-B1*02:01L HLA-DRB1*08:02L
DKSAFVNLKQLPF

SEQ ID NO: 21947 - protein, 13 aa, Severe acute respiratory syndrome coronavirus 2
  REGION 1..13: note = Table B: HLA-DRB1*11:02L HLA-DRB1*08:02L
KSAFVNLKQLPFF

SEQ ID NO: 21948 - protein, 12 aa, Severe acute respiratory syndrome coronavirus 2
  REGION 1..12: note = Table B: HLA-DRB1*11:02L
AFVNLKQLPFFY

SEQ ID NO: 21949 - protein, 12 aa, Severe acute respiratory syndrome coronavirus 2
  REGION 1..12: note = Table B: HLA-DRB1*11:02L
FVNLKQLPFFYY

SEQ ID NO: 21950 - protein, 14 aa, Severe acute respiratory syndrome coronavirus 2
  REGION 1..14: note = Table B: HLA-DRB1*11:02L
GFSLWVYKQFDTYN

SEQ ID NO: 21951 - protein, 15 aa, Severe acute respiratory syndrome coronavirus 2
  REGION 1..15: note = Table B: HLA-DRB1*11:02L
SLWVYKQFDTYNLWN

SEQ ID NO: 21952 - protein, 14 aa, Severe acute respiratory syndrome coronavirus 2
  REGION 1..14: note = Table B: HLA-DRB1*11:02L HLA-DRB1*08:02L HLA-DRB1*08:03L
LENVAFNVVNKGHF

SEQ ID NO: 21953 - protein, 15 aa, Severe acute respiratory syndrome coronavirus 2
  REGION 1..15: note = Table B: HLA-DRB1*11:02L HLA-DRB1*11:01L HLA-DRB3*01:01L HLA-DPA1*01:03-B1*02:01L
VPVSIINNTVYTKVD

SEQ ID NO: 21954 - protein, 16 aa, Severe acute respiratory syndrome coronavirus 2
  REGION 1..16: note = Table B: HLA-DRB1*11:02L
VSIINNTVYTKVDGVD

SEQ ID NO: 21955 - protein, 14 aa, Severe acute respiratory syndrome coronavirus 2
  REGION 1..14: note = Table B: HLA-DRB1*11:02L
ELFENKTTLPVNVA

SEQ ID NO: 21956 - protein, 15 aa, Severe acute respiratory syndrome coronavirus 2
  REGION 1..15: note = Table B: HLA-DRB1*11:02L HLA-DPA1*01:03-B1*04:02L
TVIWDYKRDAPAHIS

SEQ ID NO: 21957 - protein, 13 aa, Severe acute respiratory syndrome coronavirus 2
  REGION 1..13: note = Table B: HLA-DRB1*11:02L
WDYKRDAPAHIST

SEQ ID NO: 21958 - protein, 14 aa, Severe acute respiratory syndrome coronavirus 2
  REGION 1..14: note = Table B: HLA-DRB1*11:02L HLA-DQA1*01:01-B1*05:01L HLA-DRB4*01:01L
DYKRDAPAHISTIG

SEQ ID NO: 21959 - protein, 16 aa, Severe acute respiratory syndrome coronavirus 2
  REGION 1..16: note = Table B: HLA-DRB1*11:02L HLA-DPA1*01:03-B1*04:02L HLA-DPA1*01:03-B1*104:01L
VDLFRNARNGVLITEG

SEQ ID NO: 21960 - protein, 17 aa, Severe acute respiratory syndrome coronavirus 2
  REGION 1..17: note = Table B: HLA-DRB1*11:02L HLA-DRB1*10:01L
PETYFTQSRNLQEFKPR

SEQ ID NO: 21961 - protein, 16 aa, Severe acute respiratory syndrome coronavirus 2
  REGION 1..16: note = Table B: HLA-DRB1*11:02L HLA-DRB1*11:03L HLA-DRB1*12:01L
LHLLIGLAKRFKESPF

SEQ ID NO: 21962 - protein, 16 aa, Severe acute respiratory syndrome coronavirus 2
  REGION 1..16: note = Table B: HLA-DRB1*11:02L HLA-DRB1*14:02L HLA-DPA1*01:03-B1*04:02L HLA-DPA1*03:01-B1*105:01L HLA-DRB1*08:02L
HLLIGLAKRFKESPFE

SEQ ID NO: 21963 - protein, 16 aa, Severe acute respiratory syndrome coronavirus 2
  REGION 1..16: note = Table B: HLA-DRB1*11:02L
SPFELEDFIPMDSTVK

SEQ ID NO: 21964 - protein, 12 aa, Severe acute respiratory syndrome coronavirus 2
  REGION 1..12: note = Table B: HLA-DRB1*11:02L HLA-DQA1*05:05-B1*03:116L
YFITDAQTGSSK

SEQ ID NO: 21965 - protein, 17 aa, Severe acute respiratory syndrome coronavirus 2
  REGION 1..17: note = Table B: HLA-DRB1*11:02L
VIDLLLDDFVEIIKSQD

SEQ ID NO: 21966 - protein, 14 aa, Severe acute respiratory syndrome coronavirus 2
  REGION 1..14: note = Table B: HLA-DRB1*11:02L HLA-DRB4*01:01L
DFVEIIKSQDLSVV

SEQ ID NO: 21967 - protein, 20 aa, Severe acute respiratory syndrome coronavirus 2
  REGION 1..20: note = Table B: HLA-DRB1*11:02L
DGHVETFYPKLQSSQAWQPG

SEQ ID NO: 21968 - protein, 18 aa, Severe acute respiratory syndrome coronavirus 2
  REGION 1..18: note = Table B: HLA-DRB1*11:02L HLA-DQA1*05:05-B1*03:116L
LPTGTLLVDSDLNDFVSD

SEQ ID NO: 21969 - protein, 18 aa, Severe acute respiratory syndrome coronavirus 2
  REGION 1..18: note = Table B: HLA-DRB1*11:02L
ISDMYDPKTKNVTKENDS

SEQ ID NO: 21970 - protein, 17 aa, Severe acute respiratory syndrome coronavirus 2
  REGION 1..17: note = Table B: HLA-DRB1*11:02L HLA-DQA1*05:01-B1*02:01L HLA-DPA1*01:03-B1*104:01L HLA-DRB1*07:01L
DSKEGFFTYICGFIQQK

SEQ ID NO: 21971 - protein, 16 aa, Severe acute respiratory syndrome coronavirus 2
  REGION 1..16: note = Table B: HLA-DRB1*11:02L
IDGYVMHANYIFWRNT

SEQ ID NO: 21972 - protein, 18 aa, Severe acute respiratory syndrome coronavirus 2
  REGION 1..18: note = Table B: HLA-DRB1*11:02L
NPIQLSSYSLFDMSKFPL

SEQ ID NO: 21973 - protein, 14 aa, Severe acute respiratory syndrome coronavirus 2
  REGION 1..14: note = Table B: HLA-DRB1*11:02L HLA-DRB1*13:01L HLA-DPA1*01:03-B1*04:02L HLA-DPA1*02:01-B1*13:01L HLA-DPA1*01:03-B1*104:01L HLA-DQA1*05:05-B1*03:01L HLA-DRB1*07:01L HLA-DQA1*01:03-B1*06:01L HLA-DRB1*08:02L
  REGION 1..14: note = CONT. FROM ABOVE: HLA-DRB1*08:03L
LIIRENNRVVISSD

SEQ ID NO: 21974 - protein, 13 aa, Severe acute respiratory syndrome coronavirus 2
  REGION 1..13: note = Table B: HLA-DRB1*11:02L
GVYYPDKVFRSSV

SEQ ID NO: 21975 - protein, 15 aa, Severe acute respiratory syndrome coronavirus 2
  REGION 1..15: note = Table B: HLA-DRB1*11:02L HLA-DPA1*01:03-B1*04:01L
SNVTWFHAIHVSGTN

SEQ ID NO: 21976 - protein, 16 aa, Severe acute respiratory syndrome coronavirus 2
  REGION 1..16: note = Table B: HLA-DRB1*11:02L
NDPFLGVYYHKNNKSW

SEQ ID NO: 21977 - protein, 16 aa, Severe acute respiratory syndrome coronavirus 2
  REGION 1..16: note = Table B: HLA-DRB1*11:02L HLA-DRB1*08:02L
DPFLGVYYHKNNKSWM

SEQ ID NO: 21978 - protein, 18 aa, Severe acute respiratory syndrome coronavirus 2
  REGION 1..18: note = Table B: HLA-DRB1*11:02L
VSQPFLMDLEGKQGNFKN

SEQ ID NO: 21979 - protein, 17 aa, Severe acute respiratory syndrome coronavirus 2
  REGION 1..17: note = Table B: HLA-DRB1*11:02L HLA-DRB1*11:03L
VFKNIDGYFKIYSKHTP

SEQ ID NO: 21980 - protein, 14 aa, Severe acute respiratory syndrome coronavirus 2
  REGION 1..14: note = Table B: HLA-DRB1*11:02L HLA-DRB1*13:01L HLA-DPA1*01:03-B1*04:01L HLA-DPA1*01:03-B1*04:02L HLA-DPA1*01:03-B1*02:01L HLA-DPA1*01:02-B1*04:01L
TPINLVRDLPQGFS

SEQ ID NO: 21981 - protein, 17 aa, Severe acute respiratory syndrome coronavirus 2
  REGION 1..17: note = Table B: HLA-DRB1*11:02L
LPIGINITRFQTLLALH

SEQ ID NO: 21982 - protein, 19 aa, Severe acute respiratory syndrome coronavirus 2
  REGION 1..19: note = Table B: HLA-DRB1*11:02L
PIGINITRFQTLLALHRSY

SEQ ID NO: 21983 - protein, 14 aa, Severe acute respiratory syndrome coronavirus 2
  REGION 1..14: note = Table B: HLA-DRB1*11:02L
AAAYYVGYLQPRTF

SEQ ID NO: 21984 - protein, 14 aa, Severe acute respiratory syndrome coronavirus 2
  REGION 1..14: note = Table B: HLA-DRB1*11:02L
AAYYVGYLQPRTFL

SEQ ID NO: 21985 - protein, 13 aa, Severe acute respiratory syndrome coronavirus 2
  REGION 1..13: note = Table B: HLA-DRB1*11:02L HLA-DQA1*01:01-B1*05:01L HLA-DRB5*01:01L HLA-DRB4*02:01NL HLA-DRB1*08:02L
GIYQTSNFRVQPT

SEQ ID NO: 21986 - protein, 16 aa, Severe acute respiratory syndrome coronavirus 2
  REGION 1..16: note = Table B: HLA-DRB1*11:02L HLA-DPA1*01:03-B1*104:01L
SASFSTFKCYGVSPTK

SEQ ID NO: 21987 - protein, 16 aa, Severe acute respiratory syndrome coronavirus 2
  REGION 1..16: note = Table B: HLA-DRB1*11:02L
TNVYADSFVIRGDEVR

SEQ ID NO: 21988 - protein, 11 aa, Severe acute respiratory syndrome coronavirus 2
  REGION 1..11: note = Table B: HLA-DRB1*11:02L
LDSKVGGNYNY

SEQ ID NO: 21989 - protein, 15 aa, Severe acute respiratory syndrome coronavirus 2
  REGION 1..15: note = Table B: HLA-DRB1*11:02L HLA-DRB1*14:02L HLA-DRB1*13:01L HLA-DPA1*01:03-B1*04:02L
VGGNYNYLYRLFRKS

SEQ ID NO: 21990 - protein, 14 aa, Severe acute respiratory syndrome coronavirus 2
  REGION 1..14: note = Table B: HLA-DRB1*11:02L HLA-DRB1*14:02L HLA-DRB1*13:01L HLA-DPA1*01:03-B1*04:02L
GNYNYLYRLFRKSN

SEQ ID NO: 21991 - protein, 16 aa, Severe acute respiratory syndrome coronavirus 2
  REGION 1..16: note = Table B: HLA-DRB1*11:02L HLA-DPA1*01:03-B1*04:02L HLA-DPA1*01:03-B1*02:01L
YNYLYRLFRKSNLKPF

SEQ ID NO: 21992 - protein, 15 aa, Severe acute respiratory syndrome coronavirus 2
  REGION 1..15: note = Table B: HLA-DRB1*11:02L HLA-DPA1*03:01-B1*105:01L HLA-DRB1*08:03L
YLYRLFRKSNLKPFE

SEQ ID NO: 21993 - protein, 15 aa, Severe acute respiratory syndrome coronavirus 2
  REGION 1..15: note = Table B: HLA-DRB1*11:02L HLA-DRB1*09:01L HLA-DPA1*01:03-B1*104:01L HLA-DRB1*10:01L
GVGYQPYRVVVLSFE

SEQ ID NO: 21994 - protein, 16 aa, Severe acute respiratory syndrome coronavirus 2
  REGION 1..16: note = Table B: HLA-DRB1*11:02L
FLPFQQFGRDIADTTD

SEQ ID NO: 21995 - protein, 15 aa, Severe acute respiratory syndrome coronavirus 2
  REGION 1..15: note = Table B: HLA-DRB1*11:02L HLA-DPA1*01:03-B1*02:01L HLA-DRB1*15:01L
TPTWRVYSTGSNVFQ

SEQ ID NO: 21996 - protein, 15 aa, Severe acute respiratory syndrome coronavirus 2
  REGION 1..15: note = Table B: HLA-DRB1*11:02L HLA-DRB1*14:02L HLA-DRB1*08:01L HLA-DRB1*11:01L HLA-DPA1*02:01-B1*13:01L HLA-DRB1*07:01L
SQSIIAYTMSLGAEN

SEQ ID NO: 21997 - protein, 17 aa, Severe acute respiratory syndrome coronavirus 2
  REGION 1..17: note = Table B: HLA-DRB1*11:02L HLA-DPA1*01:03-B1*04:01L HLA-DQA1*05:05-B1*03:116L
IPTNFTISVTTEILPVS

SEQ ID NO: 21998 - protein, 16 aa, Severe acute respiratory syndrome coronavirus 2
  REGION 1..16: note = Table B: HLA-DRB1*11:02L HLA-DRB4*01:01L
VKQIYKTPPIKDFGGF

SEQ ID NO: 21999 - protein, 19 aa, Severe acute respiratory syndrome coronavirus 2
  REGION 1..19: note = Table B: HLA-DRB1*11:02L
PPIKDFGGFNFSQILPDPS

SEQ ID NO: 22000 - protein, 16 aa, Severe acute respiratory syndrome coronavirus 2
  REGION 1..16: note = Table B: HLA-DRB1*11:02L
FGGFNFSQILPDPSKP

SEQ ID NO: 22001 - protein, 14 aa, Severe acute respiratory syndrome coronavirus 2
  REGION 1..14: note = Table B: HLA-DRB1*11:02L
FNFSQILPDPSKPS

SEQ ID NO: 22002 - protein, 15 aa, Severe acute respiratory syndrome coronavirus 2
  REGION 1..15: note = Table B: HLA-DRB1*11:02L HLA-DRB1*07:01L
TDEMIAQYTSALLAG

SEQ ID NO: 22003 - protein, 16 aa, Severe acute respiratory syndrome coronavirus 2
  REGION 1..16: note = Table B: HLA-DRB1*11:02L
QKLIANQFNSAIGKIQ

SEQ ID NO: 22004 - protein, 15 aa, Severe acute respiratory syndrome coronavirus 2
  REGION 1..15: note = Table B: HLA-DRB1*11:02L HLA-DRB4*01:01L
IANQFNSAIGKIQDS

SEQ ID NO: 22005 - protein, 14 aa, Severe acute respiratory syndrome coronavirus 2
  REGION 1..14: note = Table B: HLA-DRB1*11:02L HLA-DRB1*14:02L HLA-DPA1*01:03-B1*04:02L HLA-DPA1*01:03-B1*02:01L
ALNTLVKQLSSNFG

SEQ ID NO: 22006 - protein, 14 aa, Severe acute respiratory syndrome coronavirus 2
  REGION 1..14: note = Table B: HLA-DRB1*11:02L HLA-DRB1*11:03L HLA-DRB1*14:02L HLA-DRB1*11:01L HLA-DQA1*05:05-B1*03:19L HLA-DQA1*05:05-B1*03:116L HLA-DPA1*01:03-B1*04:02L HLA-DRB3*01:01L HLA-DQA1*05:05-B1*03:01L HLA-DRB1*08:02L
DILSRLDKVEAEVQ

SEQ ID NO: 22007 - protein, 15 aa, Severe acute respiratory syndrome coronavirus 2
  REGION 1..15: note = Table B: HLA-DRB1*11:02L HLA-DRB4*01:01L HLA-DPA1*01:03-B1*04:02L HLA-DRB1*08:02L
ITGRLQSLQTYVTQQ

SEQ ID NO: 22008 - protein, 15 aa, Severe acute respiratory syndrome coronavirus 2
  REGION 1..15: note = Table B: HLA-DRB1*11:02L HLA-DRB4*01:01L HLA-DPA1*01:03-B1*04:02L
TGRLQSLQTYVTQQL

SEQ ID NO: 22009 - protein, 18 aa, Severe acute respiratory syndrome coronavirus 2
  REGION 1..18: note = Table B: HLA-DRB1*11:02L
LHVTYVPAQEKNFTTAPA

SEQ ID NO: 22010 - protein, 14 aa, Severe acute respiratory syndrome coronavirus 2
  REGION 1..14: note = Table B: HLA-DRB1*11:02L HLA-DPA1*01:03-B1*02:01L
EGVFVSNGTHWFVT

SEQ ID NO: 22011 - protein, 14 aa, Severe acute respiratory syndrome coronavirus 2
  REGION 1..14: note = Table B: HLA-DRB1*11:02L HLA-DRB1*11:04L HLA-DRB1*04:08L
GVFVSNGTHWFVTQ

SEQ ID NO: 22012 - protein, 14 aa, Severe acute respiratory syndrome coronavirus 2
  REGION 1..14: note = Table B: HLA-DRB1*11:02L HLA-DQA1*01:01-B1*05:01L HLA-DRB4*02:01NL HLA-DRB1*13:01L HLA-DPA1*01:03-B1*04:01L HLA-DPA1*01:03-B1*04:02L HLA-DPA1*02:01-B1*13:01L HLA-DPA1*01:03-B1*02:01L HLA-DPA1*01:03-B1*104:01L
  REGION 1..14: note = CONT. FROM ABOVE: HLA-DPA1*01:02-B1*04:01L HLA-DRB1*08:02L HLA-DRB1*15:01L
EPQIITTDNTFVSG

SEQ ID NO: 22013 - protein, 14 aa, Severe acute respiratory syndrome coronavirus 2
  REGION 1..14: note = Table B: HLA-DRB1*11:02L HLA-DPA1*01:03-B1*04:01L HLA-DRB3*01:01L
ISGINASVVNIQKE

SEQ ID NO: 22014 - protein, 15 aa, Severe acute respiratory syndrome coronavirus 2
  REGION 1..15: note = Table B: HLA-DRB1*11:02L
NASVVNIQKEIDRLN

SEQ ID NO: 22015 - protein, 13 aa, Severe acute respiratory syndrome coronavirus 2
  REGION 1..13: note = Table B: HLA-DRB1*11:02L HLA-DRB3*01:01L HLA-DRB1*08:02L
AVFQSASKIITLK

SEQ ID NO: 22016 - protein, 15 aa, Severe acute respiratory syndrome coronavirus 2
  REGION 1..15: note = Table B: HLA-DRB1*11:02L HLA-DRB1*08:02L
TSDYYQLYSTQLSTD

SEQ ID NO: 22017 - protein, 14 aa, Severe acute respiratory syndrome coronavirus 2
  REGION 1..14: note = Table B: HLA-DRB1*11:02L HLA-DRB1*11:01L HLA-DPA1*01:03-B1*02:01L HLA-DRB1*08:02L HLA-DRB1*15:01L
YYQLYSTQLSTDTG

SEQ ID NO: 22018 - protein, 14 aa, Severe acute respiratory syndrome coronavirus 2
  REGION 1..14: note = Table B: HLA-DRB1*11:02L HLA-DQA1*05:05-B1*03:116L HLA-DRB1*09:01L HLA-DRB3*01:01L HLA-DPA1*01:03-B1*104:01L HLA-DRB1*07:01L
VTFFIYNKIVDEPE

SEQ ID NO: 22019 - protein, 11 aa, Severe acute respiratory syndrome coronavirus 2
  REGION 1..11: note = Table B: HLA-DRB1*11:02L HLA-DQA1*05:05-B1*03:116L
IVDEPEEHVQI

SEQ ID NO: 22020 - protein, 16 aa, Severe acute respiratory syndrome coronavirus 2
  REGION 1..16: note = Table B: HLA-DRB1*11:02L
SNGTITVEELKKLLEQ

SEQ ID NO: 22021 - protein, 14 aa, Severe acute respiratory syndrome coronavirus 2
  REGION 1..14: note = Table B: HLA-DRB1*11:02L HLA-DRB1*11:03L HLA-DQA1*05:05-B1*03:116L HLA-DPA1*01:03-B1*02:01L HLA-DRB1*08:02L HLA-DRB1*08:03L
LSYFIASFRLFART

SEQ ID NO: 22022 - protein, 14 aa, Severe acute respiratory syndrome coronavirus 2
  REGION 1..14: note = Table B: HLA-DRB1*11:02L HLA-DRB1*11:03L HLA-DRB1*13:01L HLA-DPA1*01:03-B1*02:01L HLA-DRB1*08:02L
SYFIASFRLFARTR

SEQ ID NO: 22023 - protein, 16 aa, Severe acute respiratory syndrome coronavirus 2
  REGION 1..16: note = Table B: HLA-DRB1*11:02L HLA-DRB1*08:02L
AVILRGHLRIAGHHLG

SEQ ID NO: 22024 - protein, 15 aa, Severe acute respiratory syndrome coronavirus 2
  REGION 1..15: note = Table B: HLA-DRB1*11:02L
SYYKLGASQRVAGDS

SEQ ID NO: 22025 - protein, 15 aa, Severe acute respiratory syndrome coronavirus 2
  REGION 1..15: note = Table B: HLA-DRB1*11:02L HLA-DPA1*01:03-B1*02:01L
YYKLGASQRVAGDSG

SEQ ID NO: 22026 - protein, 13 aa, Severe acute respiratory syndrome coronavirus 2
  REGION 1..13: note = Table B: HLA-DRB1*11:02L HLA-DRB1*11:03L
LDYIINLIIKNLS

SEQ ID NO: 22027 - protein, 13 aa, Severe acute respiratory syndrome coronavirus 2
  REGION 1..13: note = Table B: HLA-DRB1*11:02L HLA-DRB1*08:02L
YIINLIIKNLSKS

SEQ ID NO: 22028 - protein, 14 aa, Severe acute respiratory syndrome coronavirus 2
  REGION 1..14: note = Table B: HLA-DRB1*11:02L HLA-DRB1*14:02L HLA-DQA1*05:05-B1*03:19L HLA-DPA1*02:01-B1*13:01L HLA-DQA1*05:05-B1*03:01L
IINLIIKNLSKSLT

SEQ ID NO: 22029 - protein, 18 aa, Severe acute respiratory syndrome coronavirus 2
  REGION 1..18: note = Table B: HLA-DRB1*11:02L HLA-DRB1*11:01L
LSKSLTENKYSQLDEEQP

SEQ ID NO: 22030 - protein, 16 aa, Severe acute respiratory syndrome coronavirus 2
  REGION 1..16: note = Table B: HLA-DRB1*11:02L HLA-DPA1*01:03-B1*02:01L HLA-DRB1*08:02L
SGTYEGNSPFHPLADN

SEQ ID NO: 22031 - protein, 14 aa, Severe acute respiratory syndrome coronavirus 2
  REGION 1..14: note = Table B: HLA-DRB1*11:02L
SPFHPLADNKFALT

SEQ ID NO: 22032 - protein, 13 aa, Severe acute respiratory syndrome coronavirus 2
  REGION 1..13: note = Table B: HLA-DRB1*11:02L HLA-DRB1*11:01L HLA-DRB1*08:02L
LGIITTVAAFHQE

SEQ ID NO: 22033 - protein, 11 aa, Severe acute respiratory syndrome coronavirus 2
  REGION 1..11: note = Table B: HLA-DRB1*11:02L
DEAGSKSPIQY

SEQ ID NO: 22034 - protein, 13 aa, Severe acute respiratory syndrome coronavirus 2
  REGION 1..13: note = Table B: HLA-DRB1*11:02L
SWFTALTQHGKED

SEQ ID NO: 22035 - protein, 17 aa, Severe acute respiratory syndrome coronavirus 2
  REGION 1..17: note = Table B: HLA-DRB1*11:02L HLA-DRB1*14:02L
SPDDQIGYYRRATRRIR

SEQ ID NO: 22036 - protein, 20 aa, Severe acute respiratory syndrome coronavirus 2
  REGION 1..20: note = Table B: HLA-DRB1*11:02L HLA-DRB1*14:02L HLA-DQA1*05:05-B1*03:19L
PDDQIGYYRRATRRIRGGDG

SEQ ID NO: 22037 - protein, 16 aa, Severe acute respiratory syndrome coronavirus 2
  REGION 1..16: note = Table B: HLA-DRB1*11:02L HLA-DQA1*01:01-B1*05:01L HLA-DRB4*02:01NL
DGIIWVATEGALNTPK

SEQ ID NO: 22038 - protein, 16 aa, Severe acute respiratory syndrome coronavirus 2
  REGION 1..16: note = Table B: HLA-DRB1*11:02L HLA-DRB4*01:01L HLA-DQA1*05:05-B1*03:116L
IIWVATEGALNTPKDH

SEQ ID NO: 22039 - protein, 16 aa, Severe acute respiratory syndrome coronavirus 2
  REGION 1..16: note = Table B: HLA-DRB1*11:02L
WPQIAQFAPSASAFFG

SEQ ID NO: 22040 - protein, 16 aa, Severe acute respiratory syndrome coronavirus 2
  REGION 1..16: note = Table B: HLA-DRB1*11:02L
ASAFFGMSRIGMEVTP

SEQ ID NO: 22041 - protein, 16 aa, Severe acute respiratory syndrome coronavirus 2
  REGION 1..16: note = Table B: HLA-DRB1*11:02L HLA-DQA1*05:05-B1*03:116L
TWLTYTGAIKLDDKDP

SEQ ID NO: 22042 - protein, 13 aa, Severe acute respiratory syndrome coronavirus 2
  REGION 1..13: note = Table B: HLA-DRB1*11:03L
EEVLSEARQHLKD

SEQ ID NO: 22043 - protein, 13 aa, Severe acute respiratory syndrome coronavirus 2
  REGION 1..13: note = Table B: HLA-DRB1*11:03L
KAAITILDGISQY

SEQ ID NO: 22044 - protein, 15 aa, Severe acute respiratory syndrome coronavirus 2
  REGION 1..15: note = Table B: HLA-DRB1*11:03L HLA-DQA1*05:05-B1*03:116L
KGLYRKCVKSREETG

SEQ ID NO: 22045 - protein, 14 aa, Severe acute respiratory syndrome coronavirus 2
  REGION 1..14: note = Table B: HLA-DRB1*11:03L HLA-DRB1*08:01L
ITFELDERIDKVLN

SEQ ID NO: 22046 - protein, 13 aa, Severe acute respiratory syndrome coronavirus 2
  REGION 1..13: note = Table B: HLA-DRB1*11:03L HLA-DRB1*11:04L HLA-DQA1*05:05-B1*03:19L HLA-DQA1*05:05-B1*03:01L HLA-DPA1*01:02-B1*04:01L HLA-DRB1*07:01L HLA-DQA1*01:03-B1*06:01L
AANVYLKHGGGVA

SEQ ID NO: 22047 - protein, 13 aa, Severe acute respiratory syndrome coronavirus 2
  REGION 1..13: note = Table B: HLA-DRB1*11:03L HLA-DRB1*14:54L HLA-DRB1*07:01L
VYLAVFDKNLYDK

SEQ ID NO: 22048 - protein, 12 aa, Severe acute respiratory syndrome coronavirus 2
  REGION 1..12: note = Table B: HLA-DRB1*11:03L HLA-DRB1*12:02L HLA-DRB1*14:17L HLA-DRB1*04:08L
NGYTVEEAKTVL

SEQ ID NO: 22049 - protein, 13 aa, Severe acute respiratory syndrome coronavirus 2
  REGION 1..13: note = Table B: HLA-DRB1*11:03L
AARYMRSLKVPAT

SEQ ID NO: 22050 - protein, 16 aa, Severe acute respiratory syndrome coronavirus 2
  REGION 1..16: note = Table B: HLA-DRB1*11:03L HLA-DRB1*08:03L
LPNDDTLRVEAFEYYH

SEQ ID NO: 22051 - protein, 15 aa, Severe acute respiratory syndrome coronavirus 2
  REGION 1..15: note = Table B: HLA-DRB1*11:03L
IDYKHYTPSFKKGAK

SEQ ID NO: 22052 - protein, 14 aa, Severe acute respiratory syndrome coronavirus 2
  REGION 1..14: note = Table B: HLA-DRB1*11:03L
YKHYTPSFKKGAKL

SEQ ID NO: 22053 - protein, 16 aa, Severe acute respiratory syndrome coronavirus 2
  REGION 1..16: note = Table B: HLA-DRB1*11:03L
VWHVNNATNKATYKPN

SEQ ID NO: 22054 - protein, 13 aa, Severe acute respiratory syndrome coronavirus 2
  REGION 1..13: note = Table B: HLA-DRB1*11:03L HLA-DRB1*11:04L HLA-DRB1*14:02L HLA-DQA1*05:05-B1*03:19L HLA-DRB1*04:10L HLA-DRB1*09:01L HLA-DPA1*01:03-B1*04:02L HLA-DRB1*08:03L
DNSSLTIKKPNEL

SEQ ID NO: 22055 - protein, 15 aa, Severe acute respiratory syndrome coronavirus 2
  REGION 1..15: note = Table B: HLA-DRB1*11:03L HLA-DRB1*09:01L HLA-DRB1*07:01L HLA-DRB1*08:03L
VPWDTIANYAKPFLN

SEQ ID NO: 22056 - protein, 15 aa, Severe acute respiratory syndrome coronavirus 2
  REGION 1..15: note = Table B: HLA-DRB1*11:03L HLA-DRB1*11:04L HLA-DRB1*11:01L HLA-DRB1*12:02L HLA-DRB1*14:54L HLA-DPA1*01:03-B1*02:01L HLA-DRB1*08:03L
DSAEVAVKMFDAYVN

SEQ ID NO: 22057 - protein, 11 aa, Severe acute respiratory syndrome coronavirus 2
  REGION 1..11: note = Table B: HLA-DRB1*11:03L HLA-DRB1*12:02L
AQVAKSHNIAL

SEQ ID NO: 22058 - protein, 13 aa, Severe acute respiratory syndrome coronavirus 2
  REGION 1..13: note = Table B: HLA-DRB1*11:03L HLA-DPA1*02:01-B1*13:01L HLA-DRB1*08:03L
ITPVHVMSKHTDF

SEQ ID NO: 22059 - protein, 14 aa, Severe acute respiratory syndrome coronavirus 2
  REGION 1..14: note = Table B: HLA-DRB1*11:03L HLA-DRB1*11:04L HLA-DRB1*04:08L
YESLRPDTRYVLMD

SEQ ID NO: 22060 - protein, 15 aa, Severe acute respiratory syndrome coronavirus 2
  REGION 1..15: note = Table B: HLA-DRB1*11:03L HLA-DRB1*14:02L
TKHFYWFFSNYLKRR

SEQ ID NO: 22061 - protein, 14 aa, Severe acute respiratory syndrome coronavirus 2
  REGION 1..14: note = Table B: HLA-DRB1*11:03L
SDVLYQPPQTSITS

SEQ ID NO: 22062 - protein, 13 aa, Severe acute respiratory syndrome coronavirus 2
  REGION 1..13: note = Table B: HLA-DRB1*11:03L HLA-DRB1*11:04L
NHNFLVQAGNVQL

SEQ ID NO: 22063 - protein, 11 aa, Severe acute respiratory syndrome coronavirus 2
  REGION 1..11: note = Table B: HLA-DRB1*11:03L HLA-DRB1*04:08L HLA-DRB1*08:02L
FLVQAGNVQLR

SEQ ID NO: 22064 - protein, 13 aa, Severe acute respiratory syndrome coronavirus 2
  REGION 1..13: note = Table B: HLA-DRB1*11:03L HLA-DRB5*01:01L HLA-DRB1*13:01L HLA-DRB1*08:03L
ILLAKDTTEAFEK

SEQ ID NO: 22065 - protein, 11 aa, Severe acute respiratory syndrome coronavirus 2
  REGION 1..11: note = Table B: HLA-DRB1*11:03L HLA-DRB1*14:02L HLA-DPA1*01:03-B1*04:01L HLA-DQA1*05:05-B1*03:116L HLA-DRB1*09:01L HLA-DPA1*01:03-B1*04:02L HLA-DRB1*12:02L HLA-DPA1*01:03-B1*104:01L HLA-DRB1*10:01L HLA-DRB1*08:03L
NIIPLTTAAKL

SEQ ID NO: 22066 - protein, 15 aa, Severe acute respiratory syndrome coronavirus 2
  REGION 1..15: note = Table B: HLA-DRB1*11:03L HLA-DRB1*15:03L
GGQPITNCVKMLCTH

SEQ ID NO: 22067 - protein, 13 aa, Severe acute respiratory syndrome coronavirus 2
  REGION 1..13: note = Table B: HLA-DRB1*11:03L HLA-DPA1*01:03-B1*04:01L HLA-DRB1*12:02L HLA-DPA1*01:03-B1*02:01L HLA-DRB1*08:03L
TNNVAFQTVKPGN

SEQ ID NO: 22068 - protein, 16 aa, Severe acute respiratory syndrome coronavirus 2
  REGION 1..16: note = Table B: HLA-DRB1*11:03L
AGFPFNKWGKARLYYD

SEQ ID NO: 22069 - protein, 13 aa, Severe acute respiratory syndrome coronavirus 2
  REGION 1..13: note = Table B: HLA-DRB1*11:03L
LKSIAATRGATVV

SEQ ID NO: 22070 - protein, 15 aa, Severe acute respiratory syndrome coronavirus 2
  REGION 1..15: note = Table B: HLA-DRB1*11:03L
ATVVIGTSKFYGGWH

SEQ ID NO: 22071 - protein, 16 aa, Severe acute respiratory syndrome coronavirus 2
  REGION 1..16: note = Table B: HLA-DRB1*11:03L HLA-DRB3*01:01L
YGGWHNMLKTVYSDVE

SEQ ID NO: 22072 - protein, 13 aa, Severe acute respiratory syndrome coronavirus 2
  REGION 1..13: note = Table B: HLA-DRB1*11:03L HLA-DRB1*14:02L HLA-DPA1*01:03-B1*04:01L HLA-DPA1*01:03-B1*04:02L HLA-DRB1*14:54L HLA-DPA1*01:03-B1*02:01L HLA-DRB1*08:02L
VNEFYAYLRKHFS

SEQ ID NO: 22073 - protein, 14 aa, Severe acute respiratory syndrome coronavirus 2
  REGION 1..14: note = Table B: HLA-DRB1*11:03L HLA-DRB1*07:01L
DYVYLPYPDPSRIL

SEQ ID NO: 22074 - protein, 13 aa, Severe acute respiratory syndrome coronavirus 2
  REGION 1..13: note = Table B: HLA-DRB1*11:03L HLA-DRB1*11:01L HLA-DRB1*13:01L
VREVLSDRELHLS

SEQ ID NO: 22075 - protein, 13 aa, Severe acute respiratory syndrome coronavirus 2
  REGION 1..13: note = Table B: HLA-DRB1*11:03L
DAVVYRGTTTYKL

SEQ ID NO: 22076 - protein, 16 aa, Severe acute respiratory syndrome coronavirus 2
  REGION 1..16: note = Table B: HLA-DRB1*11:03L HLA-DPA1*03:01-B1*105:01L
VREFLTRNPAWRKAVF

SEQ ID NO: 22077 - protein, 15 aa, Severe acute respiratory syndrome coronavirus 2
  REGION 1..15: note = Table B: HLA-DRB1*11:03L
DGGSLYVNKHAFHTP

SEQ ID NO: 22078 - protein, 14 aa, Severe acute respiratory syndrome coronavirus 2
  REGION 1..14: note = Table B: HLA-DRB1*11:03L HLA-DRB1*14:02L HLA-DRB3*01:01L HLA-DPA1*02:01-B1*13:01L HLA-DPA1*01:03-B1*104:01L
YNLWNTFTRLQSLE

SEQ ID NO: 22079 - protein, 15 aa, Severe acute respiratory syndrome coronavirus 2
  REGION 1..15: note = Table B: HLA-DRB1*11:03L HLA-DPA1*01:03-B1*04:02L
VKTQFNYYKKVDGVV

SEQ ID NO: 22080 - protein, 12 aa, Severe acute respiratory syndrome coronavirus 2
  REGION 1..12: note = Table B: HLA-DRB1*11:03L HLA-DRB1*11:04L HLA-DRB1*11:01L HLA-DRB1*09:01L HLA-DRB1*12:02L HLA-DRB3*01:01L HLA-DPA1*01:03-B1*02:01L HLA-DPA1*01:03-B1*104:01L HLA-DRB1*07:01L HLA-DRB1*10:01L HLA-DRB1*08:02L
DDFVEIIKSQDL

SEQ ID NO: 22081 - protein, 12 aa, Severe acute respiratory syndrome coronavirus 2
  REGION 1..12: note = Table B: HLA-DRB1*11:03L HLA-DRB1*11:04L HLA-DQA1*01:01-B1*05:01L HLA-DRB1*11:01L HLA-DRB1*09:01L HLA-DRB1*12:02L HLA-DRB3*01:01L HLA-DPA1*01:03-B1*02:01L HLA-DPA1*01:03-B1*104:01L HLA-DRB1*07:01L HLA-DRB1*10:01L
  REGION 1..12: note = CONT. FROM ABOVE: HLA-DRB1*08:02L
DFVEIIKSQDLS

SEQ ID NO: 22082 - protein, 16 aa, Severe acute respiratory syndrome coronavirus 2
  REGION 1..16: note = Table B: HLA-DRB1*11:03L
ISDMYDPKTKNVTKEN

SEQ ID NO: 22083 - protein, 15 aa, Severe acute respiratory syndrome coronavirus 2
  REGION 1..15: note = Table B: HLA-DRB1*11:03L
SEAFLIGCNYLGKPR

SEQ ID NO: 22084 - protein, 15 aa, Severe acute respiratory syndrome coronavirus 2
  REGION 1..15: note = Table B: HLA-DRB1*11:03L HLA-DRB1*13:01L
DMILSLLSKGRLIIR

SEQ ID NO: 22085 - protein, 16 aa, Severe acute respiratory syndrome coronavirus 2
  REGION 1..16: note = Table B: HLA-DRB1*11:03L HLA-DRB1*08:02L HLA-DRB1*08:03L
NKSWMESEFRVYSSAN

SEQ ID NO: 22086 - protein, 14 aa, Severe acute respiratory syndrome coronavirus 2
  REGION 1..14: note = Table B: HLA-DRB1*11:03L HLA-DRB1*14:54L
IDGYFKIYSKHTPI

SEQ ID NO: 22087 - protein, 14 aa, Severe acute respiratory syndrome coronavirus 2
  REGION 1..14: note = Table B: HLA-DRB1*11:03L HLA-DQA1*05:05-B1*03:01L HLA-DRB1*10:01L HLA-DRB1*08:03L HLA-DRB1*15:01L
INITRFQTLLALHR

SEQ ID NO: 22088 - protein, 11 aa, Severe acute respiratory syndrome coronavirus 2
  REGION 1..11: note = Table B: HLA-DRB1*11:03L
YGFQPTNGVGY

SEQ ID NO: 22089 - protein, 13 aa, Severe acute respiratory syndrome coronavirus 2
  REGION 1..13: note = Table B: HLA-DRB1*11:03L HLA-DQA1*01:01-B1*05:01L HLA-DRB1*08:01L HLA-DRB1*08:03L
IAVEQDKNTQEVF

SEQ ID NO: 22090 - protein, 14 aa, Severe acute respiratory syndrome coronavirus 2
  REGION 1..14: note = Table B: HLA-DRB1*11:03L
FAQVKQIYKTPPIK

SEQ ID NO: 22091 - protein, 15 aa, Severe acute respiratory syndrome coronavirus 2
  REGION 1..15: note = Table B: HLA-DRB1*11:03L HLA-DRB1*04:08L
FNGIGVTQNVLYENQ

SEQ ID NO: 22092 - protein, 13 aa, Severe acute respiratory syndrome coronavirus 2
  REGION 1..13: note = Table B: HLA-DRB1*11:03L HLA-DRB1*11:04L HLA-DRB1*04:10L HLA-DRB1*07:01L
ENQKLIANQFNSA

SEQ ID NO: 22093 - protein, 13 aa, Severe acute respiratory syndrome coronavirus 2
  REGION 1..13: note = Table B: HLA-DRB1*11:03L HLA-DRB1*11:04L HLA-DRB1*14:02L HLA-DQA1*01:01-B1*05:01L HLA-DPA1*01:03-B1*04:01L HLA-DPA1*01:03-B1*04:02L HLA-DRB1*07:01L HLA-DRB1*10:01L HLA-DRB1*08:03L
IANQFNSAIGKIQ

SEQ ID NO: 22094 - protein, 13 aa, Severe acute respiratory syndrome coronavirus 2
  REGION 1..13: note = Table B: HLA-DRB1*11:03L HLA-DRB1*12:02L
NSAIGKIQDSLSS

SEQ ID NO: 22095 - protein, 11 aa, Severe acute respiratory syndrome coronavirus 2
  REGION 1..11: note = Table B: HLA-DRB1*11:03L HLA-DRB5*01:01L HLA-DQA1*01-B1*05L HLA-DPA1*01:03-B1*04:02L HLA-DRB1*12:02L HLA-DPA1*02:01-B1*13:01L HLA-DRB1*08:02L HLA-DRB1*15:03L
SVVNIQKEIDR

SEQ ID NO: 22096 - protein, 13 aa, Severe acute respiratory syndrome coronavirus 2
  REGION 1..13: note = Table B: HLA-DRB1*11:03L HLA-DPA1*02:01-B1*13:01L HLA-DRB1*08:03L
SASKIITLKKRWQ

SEQ ID NO: 22097 - protein, 13 aa, Severe acute respiratory syndrome coronavirus 2
  REGION 1..13: note = Table B: HLA-DRB1*11:03L
ASKIITLKKRWQL

SEQ ID NO: 22098 - protein, 11 aa, Severe acute respiratory syndrome coronavirus 2
  REGION 1..11: note = Table B: HLA-DRB1*11:03L
WQLALSKGVHF

SEQ ID NO: 22099 - protein, 14 aa, Severe acute respiratory syndrome coronavirus 2
  REGION 1..14: note = Table B: HLA-DRB1*11:03L
VKPSFYVYSRVKNL

SEQ ID NO: 22100 - protein, 13 aa, Severe acute respiratory syndrome coronavirus 2
  REGION 1..13: note = Table B: HLA-DRB1*11:03L
RGHLRIAGHHLGR

SEQ ID NO: 22101 - protein, 13 aa, Severe acute respiratory syndrome coronavirus 2
  REGION 1..13: note = Table B: HLA-DRB1*11:03L
SGFAAYSRYRIGN

SEQ ID NO: 22102 - protein, 12 aa, Severe acute respiratory syndrome coronavirus 2
  REGION 1..12: note = Table B: HLA-DRB1*11:03L HLA-DRB3*01:01L HLA-DPA1*01:03-B1*02:01L
YIINLIIKNLSK

SEQ ID NO: 22103 - protein, 18 aa, Severe acute respiratory syndrome coronavirus 2
  REGION 1..18: note = Table B: HLA-DRB1*11:03L HLA-DRB1*13:01L HLA-DRB1*09:01L HLA-DRB1*15:01L
SPKLFIRQEEVQELYSPI

SEQ ID NO: 22104 - protein, 13 aa, Severe acute respiratory syndrome coronavirus 2
  REGION 1..13: note = Table B: HLA-DRB1*11:04L HLA-DRB1*14:54L HLA-DRB1*08:03L
HSYGADLKSFDLG

SEQ ID NO: 22105 - protein, 13 aa, Severe acute respiratory syndrome coronavirus 2
  REGION 1..13: note = Table B: HLA-DRB1*11:04L HLA-DRB1*11:01L HLA-DRB1*04:10L HLA-DRB1*12:01L HLA-DQA1*03:01-B1*03:02L HLA-DRB1*14:17L HLA-DQA1*02:01-B1*03:03L HLA-DRB1*15:03L
GYPLECIKDLLAR

SEQ ID NO: 22106 - protein, 14 aa, Severe acute respiratory syndrome coronavirus 2
  REGION 1..14: note = Table B: HLA-DRB1*11:04L HLA-DRB1*11:01L
FEIKLAKKFDTFNG

SEQ ID NO: 22107 - protein, 15 aa, Severe acute respiratory syndrome coronavirus 2
  REGION 1..15: note = Table B: HLA-DRB1*11:04L HLA-DRB1*11:01L HLA-DRB3*01:01L
KTILRKGGRTIAFGG

SEQ ID NO: 22108 - protein, 15 aa, Severe acute respiratory syndrome coronavirus 2
  REGION 1..15: note = Table B: HLA-DRB1*11:04L
AARVVRSIFSRTLET

SEQ ID NO: 22109 - protein, 14 aa, Severe acute respiratory syndrome coronavirus 2
  REGION 1..14: note = Table B: HLA-DRB1*11:04L
SVNITFELDERIDK

SEQ ID NO: 22110 - protein, 13 aa, Severe acute respiratory syndrome coronavirus 2
  REGION 1..13: note = Table B: HLA-DRB1*11:04L
IQTIVEVQPQLEM

SEQ ID NO: 22111 - protein, 13 aa, Severe acute respiratory syndrome coronavirus 2
  REGION 1..13: note = Table B: HLA-DRB1*11:04L HLA-DRB1*04:10L HLA-DRB3*01:01L HLA-DRB1*04:08L
KPTVVVNAANVYL

SEQ ID NO: 22112 - protein, 14 aa, Severe acute respiratory syndrome coronavirus 2
  REGION 1..14: note = Table B: HLA-DRB1*11:04L
PYIVGDVVQEGVLT

SEQ ID NO: 22113 - protein, 13 aa, Severe acute respiratory syndrome coronavirus 2
  REGION 1..13: note = Table B: HLA-DRB1*11:04L HLA-DRB1*11:01L
QLGIEFLKRGDKS

SEQ ID NO: 22114 - protein, 14 aa, Severe acute respiratory syndrome coronavirus 2
  REGION 1..14: note = Table B: HLA-DRB1*11:04L HLA-DRB1*14:02L HLA-DRB1*09:01L HLA-DPA1*01:03-B1*04:02L HLA-DRB1*08:02L
VDNINLHTQVVDMS

SEQ ID NO: 22115 - protein, 14 aa, Severe acute respiratory syndrome coronavirus 2
  REGION 1..14: note = Table B: HLA-DRB1*11:04L HLA-DRB1*11:01L HLA-DRB3*01:01L
DGADVTKIKPHNSH

SEQ ID NO: 22116 - protein, 14 aa, Severe acute respiratory syndrome coronavirus 2
  REGION 1..14: note = Table B: HLA-DRB1*11:04L
GADVTKIKPHNSHE

SEQ ID NO: 22117 - protein, 14 aa, Severe acute respiratory syndrome coronavirus 2
  REGION 1..14: note = Table B: HLA-DRB1*11:04L HLA-DPA1*03:01-B1*105:01L HLA-DQA1*05:05-B1*03:01L
ADVTKIKPHNSHEG

SEQ ID NO: 22118 - protein, 16 aa, Severe acute respiratory syndrome coronavirus 2
  REGION 1..16: note = Table B: HLA-DRB1*11:04L HLA-DRB1*14:02L
TLRVEAFEYYHTTDPS

SEQ ID NO: 22119 - protein, 15 aa, Severe acute respiratory syndrome coronavirus 2
  REGION 1..15: note = Table B: HLA-DRB1*11:04L HLA-DRB1*11:01L
KRVLNVVCKTCGQQQ

SEQ ID NO: 22120 - protein, 19 aa, Severe acute respiratory syndrome coronavirus 2
  REGION 1..19: note = Table B: HLA-DRB1*11:04L HLA-DRB4*01:01L HLA-DQA1*05:05-B1*03:116L HLA-DRB1*15:01L
GPITDVFYKENSYTTTIKP

SEQ ID NO: 22121 - protein, 14 aa, Severe acute respiratory syndrome coronavirus 2
  REGION 1..14: note = Table B: HLA-DRB1*11:04L HLA-DRB1*14:02L HLA-DRB1*11:01L HLA-DQA1*05:01-B1*02:01L HLA-DRB1*08:03L
LDNYYKKDNSYFTE

SEQ ID NO: 22122 - protein, 13 aa, Severe acute respiratory syndrome coronavirus 2
  REGION 1..13: note = Table B: HLA-DRB1*11:04L HLA-DRB1*11:01L HLA-DPA1*01:03-B1*04:02L HLA-DRB3*01:01L HLA-DPA1*01:03-B1*02:01L
VAIDYKHYTPSFK

SEQ ID NO: 22123 - protein, 14 aa, Severe acute respiratory syndrome coronavirus 2
  REGION 1..14: note = Table B: HLA-DRB1*11:04L HLA-DRB1*11:01L HLA-DPA1*02:01-B1*13:01L
AIDYKHYTPSFKKG

SEQ ID NO: 22124 - protein, 14 aa, Severe acute respiratory syndrome coronavirus 2
  REGION 1..14: note = Table B: HLA-DRB1*11:04L HLA-DQA1*01:01-B1*05:01L HLA-DRB1*08:01L HLA-DRB1*08:03L
THGLAAVNSVPWDT

SEQ ID NO: 22125 - protein, 14 aa, Severe acute respiratory syndrome coronavirus 2
  REGION 1..14: note = Table B: HLA-DRB1*11:04L HLA-DRB1*08:01L HLA-DRB3*01:01L HLA-DRB1*16:01L
VARDLSLQFKRPIN

SEQ ID NO: 22126 - protein, 15 aa, Severe acute respiratory syndrome coronavirus 2
  REGION 1..15: note = Table B: HLA-DRB1*11:04L HLA-DPA1*03:01-B1*105:01L HLA-DRB1*07:01L
GQKTYERHSLSHFVN

SEQ ID NO: 22127 - protein, 13 aa, Severe acute respiratory syndrome coronavirus 2
  REGION 1..13: note = Table B: HLA-DRB1*11:04L HLA-DRB1*04:08L
LSTFISAARQGFV

SEQ ID NO: 22128 - protein, 13 aa, Severe acute respiratory syndrome coronavirus 2
  REGION 1..13: note = Table B: HLA-DRB1*11:04L
INAQVAKSHNIAL

SEQ ID NO: 22129 - protein, 14 aa, Severe acute respiratory syndrome coronavirus 2
  REGION 1..14: note = Table B: HLA-DRB1*11:04L HLA-DRB1*11:01L
NVKDFMSLSEQLRK

SEQ ID NO: 22130 - protein, 13 aa, Severe acute respiratory syndrome coronavirus 2
  REGION 1..13: note = Table B: HLA-DRB1*11:04L HLA-DQA1*03:01-B1*03:02L
LRKQIRSAAKKNN

SEQ ID NO: 22131 - protein, 14 aa, Severe acute respiratory syndrome coronavirus 2
  REGION 1..14: note = Table B: HLA-DRB1*11:04L HLA-DRB1*11:01L HLA-DRB3*01:01L
QIRSAAKKNNLPFK

SEQ ID NO: 22132 - protein, 14 aa, Severe acute respiratory syndrome coronavirus 2
  REGION 1..14: note = Table B: HLA-DRB1*11:04L
RQVVNVVTTKIALK

SEQ ID NO: 22133 - protein, 15 aa, Severe acute respiratory syndrome coronavirus 2
  REGION 1..15: note = Table B: HLA-DRB1*11:04L
HADFDTWFSQRGGSY

SEQ ID NO: 22134 - protein, 12 aa, Severe acute respiratory syndrome coronavirus 2
  REGION 1..12: note = Table B: HLA-DRB1*11:04L HLA-DRB1*08:01L HLA-DRB1*12:02L HLA-DQA1*05:05-B1*03:01L HLA-DRB1*07:01L HLA-DRB1*08:03L
SIIQFPNTYLEG

SEQ ID NO: 22135 - protein, 15 aa, Severe acute respiratory syndrome coronavirus 2
  REGION 1..15: note = Table B: HLA-DRB1*11:04L HLA-DRB1*11:01L HLA-DRB1*10:01L
FPNTYLEGSVRVVTT

SEQ ID NO: 22136 - protein, 13 aa, Severe acute respiratory syndrome coronavirus 2
  REGION 1..13: note = Table B: HLA-DRB1*11:04L HLA-DQA1*05:05-B1*03:19L HLA-DRB1*10:01L HLA-DRB1*08:03L
EGSVRVVTTFDSE

SEQ ID NO: 22137 - protein, 13 aa, Severe acute respiratory syndrome coronavirus 2
  REGION 1..13: note = Table B: HLA-DRB1*11:04L HLA-DRB1*12:01L HLA-DRB3*01:01L
LAYYFMRFRRAFG

SEQ ID NO: 22138 - protein, 14 aa, Severe acute respiratory syndrome coronavirus 2
  REGION 1..14: note = Table B: HLA-DRB1*11:04L
LNGLWLDDVVYCPR

SEQ ID NO: 22139 - protein, 14 aa, Severe acute respiratory syndrome coronavirus 2
  REGION 1..14: note = Table B: HLA-DRB1*11:04L HLA-DRB1*11:01L
NPNYEDLLIRKSNH

SEQ ID NO: 22140 - protein, 14 aa, Severe acute respiratory syndrome coronavirus 2
  REGION 1..14: note = Table B: HLA-DRB1*11:04L HLA-DRB1*08:01L HLA-DRB1*15:01L
QEFRYMNSQGLLPP

SEQ ID NO: 22141 - protein, 14 aa, Severe acute respiratory syndrome coronavirus 2
  REGION 1..14: note = Table B: HLA-DRB1*11:04L
EFRYMNSQGLLPPK

SEQ ID NO: 22142 - protein, 14 aa, Severe acute respiratory syndrome coronavirus 2
  REGION 1..14: note = Table B: HLA-DRB1*11:04L HLA-DRB1*08:02L
TEAFEKMVSLLSVL

SEQ ID NO: 22143 - protein, 13 aa, Severe acute respiratory syndrome coronavirus 2
  REGION 1..13: note = Table B: HLA-DRB1*11:04L
MLFTMLRKLDNDA

SEQ ID NO: 22144 - protein, 14 aa, Severe acute respiratory syndrome coronavirus 2
  REGION 1..14: note = Table B: HLA-DRB1*11:04L
LNNIINNARDGCVP

SEQ ID NO: 22145 - protein, 13 aa, Severe acute respiratory syndrome coronavirus 2
  REGION 1..13: note = Table B: HLA-DRB1*11:04L HLA-DRB1*11:01L
KGLNNLNRGMVLG

SEQ ID NO: 22146 - protein, 16 aa, Severe acute respiratory syndrome coronavirus 2
  REGION 1..16: note = Table B: HLA-DRB1*11:04L
KRHTFSNYQHEETIYN

SEQ ID NO: 22147 - protein, 15 aa, Severe acute respiratory syndrome coronavirus 2
  REGION 1..15: note = Table B: HLA-DRB1*11:04L HLA-DRB3*01:01L
FSNYQHEETIYNLLK

SEQ ID NO: 22148 - protein, 14 aa, Severe acute respiratory syndrome coronavirus 2
  REGION 1..14: note = Table B: HLA-DRB1*11:04L HLA-DRB1*08:01L HLA-DRB1*11:01L HLA-DPA1*03:01-B1*105:01L HLA-DQA1*05:05-B1*03:01L
PILTLTRALTAESH

SEQ ID NO: 22149 - protein, 13 aa, Severe acute respiratory syndrome coronavirus 2
  REGION 1..13: note = Table B: HLA-DRB1*11:04L
QMNLKYAISAKNR

SEQ ID NO: 22150 - protein, 14 aa, Severe acute respiratory syndrome coronavirus 2
  REGION 1..14: note = Table B: HLA-DRB1*11:04L HLA-DRB1*04:08L
GATVVIGTSKFYGG

SEQ ID NO: 22151 - protein, 13 aa, Severe acute respiratory syndrome coronavirus 2
  REGION 1..13: note = Table B: HLA-DRB1*11:04L HLA-DRB1*11:01L HLA-DRB1*16:01L
GGWHNMLKTVYSD

SEQ ID NO: 22152 - protein, 15 aa, Severe acute respiratory syndrome coronavirus 2
  REGION 1..15: note = Table B: HLA-DRB1*11:04L HLA-DRB1*11:01L
DGNKIADKYVRNLQH

SEQ ID NO: 22153 - protein, 15 aa, Severe acute respiratory syndrome coronavirus 2
  REGION 1..15: note = Table B: HLA-DRB1*11:04L HLA-DRB1*11:01L
GNKIADKYVRNLQHR

SEQ ID NO: 22154 - protein, 12 aa, Severe acute respiratory syndrome coronavirus 2
  REGION 1..12: note = Table B: HLA-DRB1*11:04L HLA-DRB1*14:54L
ADKYVRNLQHRL

SEQ ID NO: 22155 - protein, 13 aa, Severe acute respiratory syndrome coronavirus 2
  REGION 1..13: note = Table B: HLA-DRB1*11:04L HLA-DQA1*01-B1*05L
QGLVASIKNFKSV

SEQ ID NO: 22156 - protein, 13 aa, Severe acute respiratory syndrome coronavirus 2
  REGION 1..13: note = Table B: HLA-DRB1*11:04L HLA-DRB1*09:01L
VANYQKVGMQKYS

SEQ ID NO: 22157 - protein, 14 aa, Severe acute respiratory syndrome coronavirus 2
  REGION 1..14: note = Table B: HLA-DRB1*11:04L
EPEYFNSVCRLMKT

SEQ ID NO: 22158 - protein, 13 aa, Severe acute respiratory syndrome coronavirus 2
  REGION 1..13: note = Table B: HLA-DRB1*11:04L HLA-DRB1*11:01L HLA-DRB1*13:01L
REFLTRNPAWRKA

SEQ ID NO: 22159 - protein, 14 aa, Severe acute respiratory syndrome coronavirus 2
  REGION 1..14: note = Table B: HLA-DRB1*11:04L HLA-DRB1*11:01L HLA-DRB3*01:01L HLA-DRB1*15:03L
LTSMKYFVKIGPER

SEQ ID NO: 22160 - protein, 12 aa, Severe acute respiratory syndrome coronavirus 2
  REGION 1..12: note = Table B: HLA-DRB1*11:04L HLA-DRB1*11:01L
DYVYNPFMIDVQ

SEQ ID NO: 22161 - protein, 15 aa, Severe acute respiratory syndrome coronavirus 2
  REGION 1..15: note = Table B: HLA-DRB1*11:04L
SDKAYKIEELFYSYA

SEQ ID NO: 22162 - protein, 12 aa, Severe acute respiratory syndrome coronavirus 2
  REGION 1..12: note = Table B: HLA-DRB1*11:04L HLA-DRB1*11:01L HLA-DRB3*01:01L HLA-DPA1*01:03-B1*02:01L
PAFDKSAFVNLK

SEQ ID NO: 22163 - protein, 14 aa, Severe acute respiratory syndrome coronavirus 2
  REGION 1..14: note = Table B: HLA-DRB1*11:04L HLA-DRB1*11:01L
LGGAVCRHHANEYR

SEQ ID NO: 22164 - protein, 15 aa, Severe acute respiratory syndrome coronavirus 2
  REGION 1..15: note = Table B: HLA-DRB1*11:04L HLA-DRB1*11:01L
KRNIKPVPEVKILNN

SEQ ID NO: 22165 - protein, 13 aa, Severe acute respiratory syndrome coronavirus 2
  REGION 1..13: note = Table B: HLA-DRB1*11:04L HLA-DRB1*08:03L HLA-DRB1*15:01L
DGQVDLFRNARNG

SEQ ID NO: 22166 - protein, 13 aa, Severe acute respiratory syndrome coronavirus 2
  REGION 1..13: note = Table B: HLA-DRB1*11:04L HLA-DRB1*11:01L
PETYFTQSRNLQE

SEQ ID NO: 22167 - protein, 15 aa, Severe acute respiratory syndrome coronavirus 2
  REGION 1..15: note = Table B: HLA-DRB1*11:04L HLA-DRB1*08:03L
IGCNYLGKPREQIDG

SEQ ID NO: 22168 - protein, 11 aa, Severe acute respiratory syndrome coronavirus 2
  REGION 1..11: note = Table B: HLA-DRB1*11:04L HLA-DRB1*11:01L HLA-DQA1*05:05-B1*03:116L HLA-DPA1*01:03-B1*04:02L HLA-DRB1*10:01L HLA-DRB1*08:03L
IFWRNTNPIQL

SEQ ID NO: 22169 - protein, 13 aa, Severe acute respiratory syndrome coronavirus 2
  REGION 1..13: note = Table B: HLA-DRB1*11:04L HLA-DRB3*01:01L HLA-DPA1*02:01-B1*13:01L
KVFRSSVLHSTQD

SEQ ID NO: 22170 - protein, 13 aa, Severe acute respiratory syndrome coronavirus 2
  REGION 1..13: note = Table B: HLA-DRB1*11:04L HLA-DRB3*01:01L
LGVYYHKNNKSWM

SEQ ID NO: 22171 - protein, 15 aa, Severe acute respiratory syndrome coronavirus 2
  REGION 1..15: note = Table B: HLA-DRB1*11:04L HLA-DRB1*11:01L
GKQGNFKNLREFVFK

SEQ ID NO: 22172 - protein, 13 aa, Severe acute respiratory syndrome coronavirus 2
  REGION 1..13: note = Table B: HLA-DRB1*11:04L
REFVFKNIDGYFK

SEQ ID NO: 22173 - protein, 13 aa, Severe acute respiratory syndrome coronavirus 2
  REGION 1..13: note = Table B: HLA-DRB1*11:04L HLA-DPA1*01:03-B1*02:01L
AAAYYVGYLQPRT

SEQ ID NO: 22174 - protein, 13 aa, Severe acute respiratory syndrome coronavirus 2
  REGION 1..13: note = Table B: HLA-DRB1*11:04L HLA-DRB1*15:01L
AAYYVGYLQPRTF

SEQ ID NO: 22175 - protein, 14 aa, Severe acute respiratory syndrome coronavirus 2
  REGION 1..14: note = Table B: HLA-DRB1*11:04L HLA-DRB3*01:01L HLA-DRB1*07:01L
KSFTVEKGIYQTSN

SEQ ID NO: 22176 - protein, 15 aa, Severe acute respiratory syndrome coronavirus 2
  REGION 1..15: note = Table B: HLA-DRB1*11:04L HLA-DRB1*12:02L
VQPTESIVRFPNITN

SEQ ID NO: 22177 - protein, 15 aa, Severe acute respiratory syndrome coronavirus 2
  REGION 1..15: note = Table B: HLA-DRB1*11:04L
QPTESIVRFPNITNL

SEQ ID NO: 22178 - protein, 16 aa, Severe acute respiratory syndrome coronavirus 2
  REGION 1..16: note = Table B: HLA-DRB1*11:04L
SYGFQPTNGVGYQPYR

SEQ ID NO: 22179 - protein, 13 aa, Severe acute respiratory syndrome coronavirus 2
  REGION 1..13: note = Table B: HLA-DRB1*11:04L HLA-DRB1*11:01L
ADQLTPTWRVYST

SEQ ID NO: 22180 - protein, 14 aa, Severe acute respiratory syndrome coronavirus 2
  REGION 1..14: note = Table B: HLA-DRB1*11:04L HLA-DRB1*08:01L HLA-DPA1*01:03-B1*104:01L HLA-DRB1*10:01L
TEILPVSMTKTSVD

SEQ ID NO: 22181 - protein, 14 aa, Severe acute respiratory syndrome coronavirus 2
  REGION 1..14: note = Table B: HLA-DRB1*11:04L HLA-DRB1*07:01L HLA-DRB1*15:01L
VVIGIVNNTVYDPL

SEQ ID NO: 22182 - protein, 15 aa, Severe acute respiratory syndrome coronavirus 2
  REGION 1..15: note = Table B: HLA-DRB1*11:04L HLA-DRB1*09:01L HLA-DRB3*01:01L HLA-DRB1*10:01L
IGIVNNTVYDPLQPE

SEQ ID NO: 22183 - protein, 12 aa, Severe acute respiratory syndrome coronavirus 2
  REGION 1..12: note = Table B: HLA-DRB1*11:04L HLA-DRB1*11:01L HLA-DPA1*01:03-B1*02:01L
VFQSASKIITLK

SEQ ID NO: 22184 - protein, 15 aa, Severe acute respiratory syndrome coronavirus 2
  REGION 1..15: note = Table B: HLA-DRB1*11:04L HLA-DRB1*11:01L HLA-DRB3*01:01L
VYFLQSINFVRIIMR

SEQ ID NO: 22185 - protein, 14 aa, Severe acute respiratory syndrome coronavirus 2
  REGION 1..14: note = Table B: HLA-DRB1*11:04L HLA-DRB1*14:02L HLA-DRB1*15:03L
TSGDGTTSPISEHD

SEQ ID NO: 22186 - protein, 13 aa, Severe acute respiratory syndrome coronavirus 2
  REGION 1..13: note = Table B: HLA-DRB1*11:04L HLA-DRB1*11:01L HLA-DRB3*01:01L HLA-DPA1*01:03-B1*02:01L
HSYFTSDYYQLYS

SEQ ID NO: 22187 - protein, 14 aa, Severe acute respiratory syndrome coronavirus 2
  REGION 1..14: note = Table B: HLA-DRB1*11:04L HLA-DRB1*08:01L HLA-DRB1*11:01L
RCDIKDLPKEITVA

SEQ ID NO: 22188 - protein, 14 aa, Severe acute respiratory syndrome coronavirus 2
  REGION 1..14: note = Table B: HLA-DRB1*11:04L
GFAAYSRYRIGNYK

SEQ ID NO: 22189 - protein, 14 aa, Severe acute respiratory syndrome coronavirus 2
  REGION 1..14: note = Table B: HLA-DRB1*11:04L HLA-DPA1*01:03-B1*04:02L
LYHYQECVRGTTVL

SEQ ID NO: 22190 - protein, 17 aa, Severe acute respiratory syndrome coronavirus 2
  REGION 1..17: note = Table B: HLA-DRB1*11:04L
AEGSRGGSQASSRSSSR

SEQ ID NO: 22191 - protein, 16 aa, Severe acute respiratory syndrome coronavirus 2
  REGION 1..16: note = Table B: HLA-DRB1*11:04L HLA-DRB1*11:01L
GSRGGSQASSRSSSRS

SEQ ID NO: 22192 - protein, 15 aa, Severe acute respiratory syndrome coronavirus 2
  REGION 1..15: note = Table B: HLA-DRB1*11:04L HLA-DRB1*11:01L
KAYNVTQAFGRRGPE

SEQ ID NO: 22193 - protein, 17 aa, Severe acute respiratory syndrome coronavirus 2
  REGION 1..17: note = Table B: HLA-DRB1*11:04L
TPSGTWLTYTGAIKLDD

SEQ ID NO: 22194 - protein, 14 aa, Severe acute respiratory syndrome coronavirus 2
  REGION 1..14: note = Table B: HLA-DRB1*11:04L
AADLDDFSKQLQQS

SEQ ID NO: 22195 - protein, 15 aa, Severe acute respiratory syndrome coronavirus 2
  REGION 1..15: note = Table B: HLA-DRB1*14:02L HLA-DRB4*01:01L HLA-DRB1*09:01L
DVLVRGFGDSVEEVL

SEQ ID NO: 22196 - protein, 11 aa, Severe acute respiratory syndrome coronavirus 2
  REGION 1..11: note = Table B: HLA-DRB1*14:02L HLA-DPA1*01:03-B1*04:02L HLA-DPA1*01:03-B1*104:01L
VEVEKGVLPQL

SEQ ID NO: 22197 - protein, 13 aa, Severe acute respiratory syndrome coronavirus 2
  REGION 1..13: note = Table B: HLA-DRB1*14:02L HLA-DQA1*05:05-B1*03:116L HLA-DPA1*01:03-B1*04:02L HLA-DRB1*08:02L HLA-DRB1*15:03L
EQPYVFIKRSDAR

SEQ ID NO: 22198 - protein, 16 aa, Severe acute respiratory syndrome coronavirus 2
  REGION 1..16: note = Table B: HLA-DRB1*14:02L
EDFQENWNTKHSSGVT

SEQ ID NO: 22199 - protein, 18 aa, Severe acute respiratory syndrome coronavirus 2
  REGION 1..18: note = Table B: HLA-DRB1*14:02L HLA-DPA1*01:03-B1*04:02L
IKDLLARAGKASCTLSEQ

SEQ ID NO: 22200 - protein, 13 aa, Severe acute respiratory syndrome coronavirus 2
  REGION 1..13: note = Table B: HLA-DRB1*14:02L HLA-DQA1*05:05-B1*03:01L
LAEYHNESGLKTI

SEQ ID NO: 22201 - protein, 14 aa, Severe acute respiratory syndrome coronavirus 2
  REGION 1..14: note = Table B: HLA-DRB1*14:02L HLA-DPA1*02:01-B1*13:01L HLA-DPA1*01:03-B1*104:01L
SFSASTSAFVETVK

SEQ ID NO: 22202 - protein, 16 aa, Severe acute respiratory syndrome coronavirus 2
  REGION 1..16: note = Table B: HLA-DRB1*14:02L HLA-DPA1*02:01-B1*13:01L
GNFKVTKGKAKKGAWN

SEQ ID NO: 22203 - protein, 16 aa, Severe acute respiratory syndrome coronavirus 2
  REGION 1..16: note = Table B: HLA-DRB1*14:02L
GGVVQLTSQWLTNIFG

SEQ ID NO: 22204 - protein, 14 aa, Severe acute respiratory syndrome coronavirus 2
  REGION 1..14: note = Table B: HLA-DRB1*14:02L HLA-DRB1*08:02L
GGQIVTCAKEIKES

SEQ ID NO: 22205 - protein, 18 aa, Severe acute respiratory syndrome coronavirus 2
  REGION 1..18: note = Table B: HLA-DRB1*14:02L HLA-DPA1*01:03-B1*04:02L
VNKFLALCADSIIIGGAK

SEQ ID NO: 22206 - protein, 14 aa, Severe acute respiratory syndrome coronavirus 2
  REGION 1..14: note = Table B: HLA-DRB1*14:02L HLA-DPA1*02:01-B1*13:01L
IIIGGAKLKALNLG

SEQ ID NO: 22207 - protein, 16 aa, Severe acute respiratory syndrome coronavirus 2
  REGION 1..16: note = Table B: HLA-DRB1*14:02L HLA-DPA1*01:03-B1*04:02L HLA-DRB1*07:01L HLA-DRB1*15:03L
SKGLYRKCVKSREETG

SEQ ID NO: 22208 - protein, 13 aa, Severe acute respiratory syndrome coronavirus 2
  REGION 1..13: note = Table B: HLA-DRB1*14:02L HLA-DQA1*01-B1*05L
KEIIFLEGETLPT

SEQ ID NO: 22209 - protein, 13 aa, Severe acute respiratory syndrome coronavirus 2
  REGION 1..13: note = Table B: HLA-DRB1*14:02L HLA-DRB1*12:02L
EIIFLEGETLPTE

SEQ ID NO: 22210 - protein, 14 aa, Severe acute respiratory syndrome coronavirus 2
  REGION 1..14: note = Table B: HLA-DRB1*14:02L HLA-DPA1*02:01-B1*13:01L
IIFLEGETLPTEVL

SEQ ID NO: 22211 - protein, 15 aa, Severe acute respiratory syndrome coronavirus 2
  REGION 1..15: note = Table B: HLA-DRB1*14:02L
TEKYCALAPNMMVTN

SEQ ID NO: 22212 - protein, 14 aa, Severe acute respiratory syndrome coronavirus 2
  REGION 1..14: note = Table B: HLA-DRB1*14:02L HLA-DPA1*02:01-B1*13:01L HLA-DRB1*07:01L HLA-DRB1*10:01L
NTFTLKGGAPTKVT

SEQ ID NO: 22213 - protein, 14 aa, Severe acute respiratory syndrome coronavirus 2
  REGION 1..14: note = Table B: HLA-DRB1*14:02L
TFGDDTVIEVQGYK

SEQ ID NO: 22214 - protein, 14 aa, Severe acute respiratory syndrome coronavirus 2
  REGION 1..14: note = Table B: HLA-DRB1*14:02L HLA-DRB1*15:03L
SEDNQTTTIQTIVE

SEQ ID NO: 22215 - protein, 13 aa, Severe acute respiratory syndrome coronavirus 2
  REGION 1..13: note = Table B: HLA-DRB1*14:02L HLA-DRB1*08:01L HLA-DPA1*01:03-B1*104:01L
DIQLLKSAYENFN

SEQ ID NO: 22216 - protein, 13 aa, Severe acute respiratory syndrome coronavirus 2
  REGION 1..13: note = Table B: HLA-DRB1*14:02L
TLEETKFLTENLL

SEQ ID NO: 22217 - protein, 15 aa, Severe acute respiratory syndrome coronavirus 2
  REGION 1..15: note = Table B: HLA-DRB1*14:02L HLA-DRB1*08:02L
QRKYKGIKIQEGVVD

SEQ ID NO: 22218 - protein, 18 aa, Severe acute respiratory syndrome coronavirus 2
  REGION 1..18: note = Table B: HLA-DRB1*14:02L
TLLSLREVRTIKVFTTVD

SEQ ID NO: 22219 - protein, 18 aa, Severe acute respiratory syndrome coronavirus 2
  REGION 1..18: note = Table B: HLA-DRB1*14:02L
DPSFLGRYMSALNHTKKW

SEQ ID NO: 22220 - protein, 16 aa, Severe acute respiratory syndrome coronavirus 2
  REGION 1..16: note = Table B: HLA-DRB1*14:02L HLA-DQA1*05:05-B1*03:19L HLA-DQA1*05:01-B1*02:01L HLA-DPA1*01:03-B1*04:02L HLA-DRB1*08:02L HLA-DRB1*08:03L
MSALNHTKKWKYPQVN

SEQ ID NO: 22221 - protein, 16 aa, Severe acute respiratory syndrome coronavirus 2
  REGION 1..16: note = Table B: HLA-DRB1*14:02L
GLTSIKWADNNCYLAT

SEQ ID NO: 22222 - protein, 16 aa, Severe acute respiratory syndrome coronavirus 2
  REGION 1..16: note = Table B: HLA-DRB1*14:02L HLA-DRB1*09:01L
LGDVRETMSYLFQHAN

SEQ ID NO: 22223 - protein, 13 aa, Severe acute respiratory syndrome coronavirus 2
  REGION 1..13: note = Table B: HLA-DRB1*14:02L HLA-DPA1*01:03-B1*04:02L HLA-DRB1*12:01L HLA-DQA1*05:05-B1*03:01L HLA-DRB1*16:01L HLA-DQA1*01:03-B1*06:01L
ASEYTGNYQCGHY

SEQ ID NO: 22224 - protein, 11 aa, Severe acute respiratory syndrome coronavirus 2
  REGION 1..11: note = Table B: HLA-DRB1*14:02L HLA-DQA1*05:01-B1*02:01L HLA-DPA1*03:01-B1*105:01L HLA-DRB1*15:03L
YPNASFDNFKF

SEQ ID NO: 22225 - protein, 13 aa, Severe acute respiratory syndrome coronavirus 2
  REGION 1..13: note = Table B: HLA-DRB1*14:02L
IKFADDLNQLTGY

SEQ ID NO: 22226 - protein, 16 aa, Severe acute respiratory syndrome coronavirus 2
  REGION 1..16: note = Table B: HLA-DRB1*14:02L
SRELKVTFFPDLNGDV

SEQ ID NO: 22227 - protein, 16 aa, Severe acute respiratory syndrome coronavirus 2
  REGION 1..16: note = Table B: HLA-DRB1*14:02L
AIDYKHYTPSFKKGAK

SEQ ID NO: 22228 - protein, 15 aa, Severe acute respiratory syndrome coronavirus 2
  REGION 1..15: note = Table B: HLA-DRB1*14:02L HLA-DQA1*05:05-B1*03:116L
DYKHYTPSFKKGAKL

SEQ ID NO: 22229 - protein, 15 aa, Severe acute respiratory syndrome coronavirus 2
  REGION 1..15: note = Table B: HLA-DRB1*14:02L HLA-DRB1*08:03L
EDLKPVSEEVVENPT

SEQ ID NO: 22230 - protein, 14 aa, Severe acute respiratory syndrome coronavirus 2
  REGION 1..14: note = Table B: HLA-DRB1*14:02L
ASFYYVWKSYVHVV

SEQ ID NO: 22231 - protein, 12 aa, Severe acute respiratory syndrome coronavirus 2
  REGION 1..12: note = Table B: HLA-DRB1*14:02L
QSSYIVDSVTVK

SEQ ID NO: 22232 - protein, 13 aa, Severe acute respiratory syndrome coronavirus 2
  REGION 1..13: note = Table B: HLA-DRB1*14:02L HLA-DRB1*15:03L
ILLLDQALVSDVG

SEQ ID NO: 22233 - protein, 17 aa, Severe acute respiratory syndrome coronavirus 2
  REGION 1..17: note = Table B: HLA-DRB1*14:02L HLA-DPA1*01:03-B1*04:02L
VPMEKLKTLVATAEAEL

SEQ ID NO: 22234 - protein, 11 aa, Severe acute respiratory syndrome coronavirus 2
  REGION 1..11: note = Table B: HLA-DRB1*14:02L HLA-DQA1*05:05-B1*03:19L HLA-DQA1*01:03-B1*06:01L
FVDSDVETKDV

SEQ ID NO: 22235 - protein, 14 aa, Severe acute respiratory syndrome coronavirus 2
  REGION 1..14: note = Table B: HLA-DRB1*14:02L
NNYMLTYNKVENMT

SEQ ID NO: 22236 - protein, 17 aa, Severe acute respiratory syndrome coronavirus 2
  REGION 1..17: note = Table B: HLA-DRB1*14:02L HLA-DQA1*05:05-B1*03:19L HLA-DQA1*05:05-B1*03:116L HLA-DPA1*01:03-B1*04:02L
LRKQIRSAAKKNNLPFK

SEQ ID NO: 22237 - protein, 16 aa, Severe acute respiratory syndrome coronavirus 2
  REGION 1..16: note = Table B: HLA-DRB1*14:02L HLA-DQA1*05:05-B1*03:19L HLA-DQA1*05:05-B1*03:01L HLA-DRB1*08:02L
GGKIVNNWLKQLIKVT

SEQ ID NO: 22238 - protein, 11 aa, Severe acute respiratory syndrome coronavirus 2
  REGION 1..11: note = Table B: HLA-DRB1*14:02L HLA-DQA1*02:01-B1*03:03L
RVFSAVGNICY

SEQ ID NO: 22239 - protein, 14 aa, Severe acute respiratory syndrome coronavirus 2
  REGION 1..14: note = Table B: HLA-DRB1*14:02L
SGRWVLNNDYYRSL

SEQ ID NO: 22240 - protein, 16 aa, Severe acute respiratory syndrome coronavirus 2
  REGION 1..16: note = Table B: HLA-DRB1*14:02L HLA-DPA1*01:03-B1*104:01L
AVNLLTNMFTPLIQPI

SEQ ID NO: 22241 - protein, 18 aa, Severe acute respiratory syndrome coronavirus 2
  REGION 1..18: note = Table B: HLA-DRB1*14:02L HLA-DPA1*01:03-B1*104:01L
QPIGALDISASIVAGGIV

SEQ ID NO: 22242 - protein, 18 aa, Severe acute respiratory syndrome coronavirus 2
  REGION 1..18: note = Table B: HLA-DRB1*14:02L
NKEMYLKLRSDVLLPLTQ

SEQ ID NO: 22243 - protein, 16 aa, Severe acute respiratory syndrome coronavirus 2
  REGION 1..16: note = Table B: HLA-DRB1*14:02L
LAKALNDFSNSGSDVL

SEQ ID NO: 22244 - protein, 18 aa, Severe acute respiratory syndrome coronavirus 2
  REGION 1..18: note = Table B: HLA-DRB1*14:02L
ALNDFSNSGSDVLYQPPQ

SEQ ID NO: 22245 - protein, 17 aa, Severe acute respiratory syndrome coronavirus 2
  REGION 1..17: note = Table B: HLA-DRB1*14:02L
VGFNIDYDCVSFCYMHH

SEQ ID NO: 22246 - protein, 16 aa, Severe acute respiratory syndrome coronavirus 2
  REGION 1..16: note = Table B: HLA-DRB1*14:02L
NIDYDCVSFCYMHHME

SEQ ID NO: 22247 - protein, 16 aa, Severe acute respiratory syndrome coronavirus 2
  REGION 1..16: note = Table B: HLA-DRB1*14:02L
NGRTILGSALLEDEFT

SEQ ID NO: 22248 - protein, 16 aa, Severe acute respiratory syndrome coronavirus 2
  REGION 1..16: note = Table B: HLA-DRB1*14:02L
GRTILGSALLEDEFTP

SEQ ID NO: 22249 - protein, 14 aa, Severe acute respiratory syndrome coronavirus 2
  REGION 1..14: note = Table B: HLA-DRB1*14:02L HLA-DRB1*08:01L HLA-DRB4*01:01L HLA-DRB1*04:10L HLA-DQA1*05:05-B1*03:01L HLA-DRB1*08:03L
SALLEDEFTPFDVV

SEQ ID NO: 22250 - protein, 19 aa, Severe acute respiratory syndrome coronavirus 2
  REGION 1..19: note = Table B: HLA-DRB1*14:02L HLA-DPA1*01:03-B1*04:02L
TPFDVVRQCSGVTFQSAVK

SEQ ID NO: 22251 - protein, 14 aa, Severe acute respiratory syndrome coronavirus 2
  REGION 1..14: note = Table B: HLA-DRB1*14:02L HLA-DPA1*01:03-B1*04:02L
YFNMVYMPASWVMR

SEQ ID NO: 22252 - protein, 13 aa, Severe acute respiratory syndrome coronavirus 2
  REGION 1..13: note = Table B: HLA-DRB1*14:02L HLA-DQA1*01-B1*05L HLA-DQA1*05:05-B1*03:19L HLA-DQA1*05:05-B1*03:01L
LQQLRVESSSKLW

SEQ ID NO: 22253 - protein, 18 aa, Severe acute respiratory syndrome coronavirus 2
  REGION 1..18: note = Table B: HLA-DRB1*14:02L
VDINKLCEEMLDNRATLQ

SEQ ID NO: 22254 - protein, 12 aa, Severe acute respiratory syndrome coronavirus 2
  REGION 1..12: note = Table B: HLA-DRB1*14:02L
EFDRDAAMQRKL

SEQ ID NO: 22255 - protein, 18 aa, Severe acute respiratory syndrome coronavirus 2
  REGION 1..18: note = Table B: HLA-DRB1*14:02L HLA-DPA1*01:03-B1*104:01L
VTSAMQTMLFTMLRKLDN

SEQ ID NO: 22256 - protein, 15 aa, Severe acute respiratory syndrome coronavirus 2
  REGION 1..15: note = Table B: HLA-DRB1*14:02L
QTMLFTMLRKLDNDA

SEQ ID NO: 22257 - protein, 16 aa, Severe acute respiratory syndrome coronavirus 2
  REGION 1..16: note = Table B: HLA-DRB1*14:02L HLA-DRB1*11:01L HLA-DQA1*05:05-B1*03:19L
GGRFVLALLSDLQDLK

SEQ ID NO: 22258 - protein, 16 aa, Severe acute respiratory syndrome coronavirus 2
  REGION 1..16: note = Table B: HLA-DRB1*14:02L HLA-DPA1*01:03-B1*104:01L
LSDLQDLKWARFPKSD

SEQ ID NO: 22259 - protein, 13 aa, Severe acute respiratory syndrome coronavirus 2
  REGION 1..13: note = Table B: HLA-DRB1*14:02L
GTIYTELEPPCRF

SEQ ID NO: 22260 - protein, 14 aa, Severe acute respiratory syndrome coronavirus 2
  REGION 1..14: note = Table B: HLA-DRB1*14:02L HLA-DPA1*02:01-B1*13:01L
YFIKGLNNLNRGMV

SEQ ID NO: 22261 - protein, 14 aa, Severe acute respiratory syndrome coronavirus 2
  REGION 1..14: note = Table B: HLA-DRB1*14:02L
GMVLGSLAATVRLQ

SEQ ID NO: 22262 - protein, 16 aa, Severe acute respiratory syndrome coronavirus 2
  REGION 1..16: note = Table B: HLA-DRB1*14:02L HLA-DQA1*05:05-B1*03:19L HLA-DQA1*05:05-B1*03:116L HLA-DPA1*01:03-B1*04:02L HLA-DRB1*12:01L HLA-DPA1*03:01-B1*105:01L HLA-DQA1*05:05-B1*03:01L HLA-DRB1*16:01L HLA-DRB1*08:02L
GQPITNCVKMLCTHTG

SEQ ID NO: 22263 - protein, 19 aa, Severe acute respiratory syndrome coronavirus 2
  REGION 1..19: note = Table B: HLA-DRB1*14:02L HLA-DPA1*03:01-B1*105:01L
PNPKGFCDLKGKYVQIPTT

SEQ ID NO: 22264 - protein, 17 aa, Severe acute respiratory syndrome coronavirus 2
  REGION 1..17: note = Table B: HLA-DRB1*14:02L
DEDDNLIDSYFVVKRHT

SEQ ID NO: 22265 - protein, 13 aa, Severe acute respiratory syndrome coronavirus 2
  REGION 1..13: note = Table B: HLA-DRB1*14:02L HLA-DPA1*01:03-B1*04:02L HLA-DPA1*01:03-B1*02:01L HLA-DRB1*08:02L
IDSYFVVKRHTFS

SEQ ID NO: 22266 - protein, 16 aa, Severe acute respiratory syndrome coronavirus 2
  REGION 1..16: note = Table B: HLA-DRB1*14:02L HLA-DPA1*01:03-B1*104:01L
IYNLLKDCPAVAKHDF

SEQ ID NO: 22267 - protein, 16 aa, Severe acute respiratory syndrome coronavirus 2
  REGION 1..16: note = Table B: HLA-DRB1*14:02L HLA-DQA1*05:05-B1*03:19L HLA-DQA1*05:05-B1*03:01L
YNLLKDCPAVAKHDFF

SEQ ID NO: 22268 - protein, 16 aa, Severe acute respiratory syndrome coronavirus 2
  REGION 1..16: note = Table B: HLA-DRB1*14:02L
VDSYYSLLMPILTLTR

SEQ ID NO: 22269 - protein, 16 aa, Severe acute respiratory syndrome coronavirus 2
  REGION 1..16: note = Table B: HLA-DRB1*14:02L
ILTLTRALTAESHVDT

SEQ ID NO: 22270 - protein, 15 aa, Severe acute respiratory syndrome coronavirus 2
  REGION 1..15: note = Table B: HLA-DRB1*14:02L HLA-DRB1*11:01L HLA-DQA1*05:01-B1*02:01L
TKPYIKWDLLKYDFT

SEQ ID NO: 22271 - protein, 16 aa, Severe acute respiratory syndrome coronavirus 2
  REGION 1..16: note = Table B: HLA-DRB1*14:02L HLA-DPA1*01:03-B1*104:01L HLA-DRB1*08:03L
KPYIKWDLLKYDFTEE

SEQ ID NO: 22272 - protein, 14 aa, Severe acute respiratory syndrome coronavirus 2
  REGION 1..14: note = Table B: HLA-DRB1*14:02L HLA-DRB1*15:01L
PAMHAASGNLLLDK

SEQ ID NO: 22273 - protein, 13 aa, Severe acute respiratory syndrome coronavirus 2
  REGION 1..13: note = Table B: HLA-DRB1*14:02L HLA-DPA1*01:03-B1*04:01L HLA-DPA1*01:03-B1*02:01L HLA-DPA1*01:03-B1*104:01L HLA-DRB1*07:01L
YYRYNLPTMCDIR

SEQ ID NO: 22274 - protein, 16 aa, Severe acute respiratory syndrome coronavirus 2
  REGION 1..16: note = Table B: HLA-DRB1*14:02L HLA-DRB3*01:01L HLA-DPA1*01:03-B1*104:01L
KARLYYDSMSYEDQDA

SEQ ID NO: 22275 - protein, 16 aa, Severe acute respiratory syndrome coronavirus 2
  REGION 1..16: note = Table B: HLA-DRB1*14:02L HLA-DPA1*01:03-B1*104:01L
ARLYYDSMSYEDQDAL

SEQ ID NO: 22276 - protein, 18 aa, Severe acute respiratory syndrome coronavirus 2
  REGION 1..18: note = Table B: HLA-DRB1*14:02L
VIPTITQMNLKYAISAKN

SEQ ID NO: 22277 - protein, 18 aa, Severe acute respiratory syndrome coronavirus 2
  REGION 1..18: note = Table B: HLA-DRB1*14:02L
IPTITQMNLKYAISAKNR

SEQ ID NO: 22278 - protein, 13 aa, Severe acute respiratory syndrome coronavirus 2
  REGION 1..13: note = Table B: HLA-DRB1*14:02L HLA-DQA1*05:05-B1*03:116L HLA-DPA1*01:03-B1*04:02L HLA-DPA1*01:03-B1*02:01L HLA-DRB1*08:02L
NLKYAISAKNRAR

SEQ ID NO: 22279 - protein, 18 aa, Severe acute respiratory syndrome coronavirus 2
  REGION 1..18: note = Table B: HLA-DRB1*14:02L
TNRQFHQKLLKSIAATRG

SEQ ID NO: 22280 - protein, 17 aa, Severe acute respiratory syndrome coronavirus 2
  REGION 1..17: note = Table B: HLA-DRB1*14:02L
SHRFYRLANECAQVLSE

SEQ ID NO: 22281 - protein, 16 aa, Severe acute respiratory syndrome coronavirus 2
  REGION 1..16: note = Table B: HLA-DRB1*14:02L HLA-DQA1*05:01-B1*02:01L HLA-DPA1*03:01-B1*105:01L
GSLYVKPGGTSSGDAT

SEQ ID NO: 22282 - protein, 14 aa, Severe acute respiratory syndrome coronavirus 2
  REGION 1..14: note = Table B: HLA-DRB1*14:02L HLA-DRB1*08:02L
NEFYAYLRKHFSMM

SEQ ID NO: 22283 - protein, 11 aa, Severe acute respiratory syndrome coronavirus 2
  REGION 1..11: note = Table B: HLA-DRB1*14:02L HLA-DQA1*05:05-B1*03:116L HLA-DPA1*01:03-B1*04:02L HLA-DPA1*03:01-B1*105:01L HLA-DQA1*01:03-B1*06:01L HLA-DRB1*08:02L
ETDLTKGPHEF

SEQ ID NO: 22284 - protein, 16 aa, Severe acute respiratory syndrome coronavirus 2
  REGION 1..16: note = Table B: HLA-DRB1*14:02L HLA-DPA1*01:03-B1*04:01L
FVSLAIDAYPLTKHPN

SEQ ID NO: 22285 - protein, 16 aa, Severe acute respiratory syndrome coronavirus 2
  REGION 1..16: note = Table B: HLA-DRB1*14:02L
ADVFHLYLQYIRKLHD

SEQ ID NO: 22286 - protein, 16 aa, Severe acute respiratory syndrome coronavirus 2
  REGION 1..16: note = Table B: HLA-DRB1*14:02L
VFHLYLQYIRKLHDEL

SEQ ID NO: 22287 - protein, 16 aa, Severe acute respiratory syndrome coronavirus 2
  REGION 1..16: note = Table B: HLA-DRB1*14:02L
LGGMSYYCKSHKPPIS

SEQ ID NO: 22288 - protein, 14 aa, Severe acute respiratory syndrome coronavirus 2
  REGION 1..14: note = Table B: HLA-DRB1*14:02L HLA-DRB1*08:01L HLA-DRB1*11:01L
ETFKLSYGIATVRE

SEQ ID NO: 22289 - protein, 18 aa, Severe acute respiratory syndrome coronavirus 2
  REGION 1..18: note = Table B: HLA-DRB1*14:02L
FKLSYGIATVREVLSDRE

SEQ ID NO: 22290 - protein, 18 aa, Severe acute respiratory syndrome coronavirus 2
  REGION 1..18: note = Table B: HLA-DRB1*14:02L
SDRELHLSWEVGKPRPPL

SEQ ID NO: 22291 - protein, 18 aa, Severe acute respiratory syndrome coronavirus 2
  REGION 1..18: note = Table B: HLA-DRB1*14:02L
DRELHLSWEVGKPRPPLN

SEQ ID NO: 22292 - protein, 16 aa, Severe acute respiratory syndrome coronavirus 2
  REGION 1..16: note = Table B: HLA-DRB1*14:02L HLA-DPA1*01:03-B1*04:02L
YVRITGLYPTLNISDE

SEQ ID NO: 22293 - protein, 16 aa, Severe acute respiratory syndrome coronavirus 2
  REGION 1..16: note = Table B: HLA-DRB1*14:02L
EKALKYLPIDKCSRII

SEQ ID NO: 22294 - protein, 16 aa, Severe acute respiratory syndrome coronavirus 2
  REGION 1..16: note = Table B: HLA-DRB1*14:02L
KALKYLPIDKCSRIIP

SEQ ID NO: 22295 - protein, 16 aa, Severe acute respiratory syndrome coronavirus 2
  REGION 1..16: note = Table B: HLA-DRB1*14:02L HLA-DQA1*05:05-B1*03:19L
EPEYFNSVCRLMKTIG

SEQ ID NO: 22296 - protein, 11 aa, Severe acute respiratory syndrome coronavirus 2
  REGION 1..11: note = Table B: HLA-DRB1*14:02L
RLMKTIGPDMF

SEQ ID NO: 22297 - protein, 16 aa, Severe acute respiratory syndrome coronavirus 2
  REGION 1..16: note = Table B: HLA-DRB1*14:02L
KLQFTSLEIPRRNVAT

SEQ ID NO: 22298 - protein, 16 aa, Severe acute respiratory syndrome coronavirus 2
  REGION 1..16: note = Table B: HLA-DRB1*14:02L HLA-DRB1*11:01L HLA-DQA1*05:01-B1*02:01L HLA-DPA1*01:03-B1*104:01L
IGFDVEGCHATREAVG

SEQ ID NO: 22299 - protein, 16 aa, Severe acute respiratory syndrome coronavirus 2
  REGION 1..16: note = Table B: HLA-DRB1*14:02L
IKIVQMLSDTLKNLSD

SEQ ID NO: 22300 - protein, 17 aa, Severe acute respiratory syndrome coronavirus 2
  REGION 1..17: note = Table B: HLA-DRB1*14:02L HLA-DQA1*05:05-B1*03:19L
IVQMLSDTLKNLSDRVV

SEQ ID NO: 22301 - protein, 15 aa, Severe acute respiratory syndrome coronavirus 2
  REGION 1..15: note = Table B: HLA-DRB1*14:02L HLA-DPA1*01:03-B1*04:02L
IDVQQWGFTGNLQSN

SEQ ID NO: 22302 - protein, 16 aa, Severe acute respiratory syndrome coronavirus 2
  REGION 1..16: note = Table B: HLA-DRB1*14:02L
DELKINAACRKVQHMV

SEQ ID NO: 22303 - protein, 16 aa, Severe acute respiratory syndrome coronavirus 2
  REGION 1..16: note = Table B: HLA-DRB1*14:02L
EYRLYLDAYNMMISAG

SEQ ID NO: 22304 - protein, 14 aa, Severe acute respiratory syndrome coronavirus 2
  REGION 1..14: note = Table B: HLA-DRB1*14:02L
YKQFDTYNLWNTFT

SEQ ID NO: 22305 - protein, 13 aa, Severe acute respiratory syndrome coronavirus 2
  REGION 1..13: note = Table B: HLA-DRB1*14:02L HLA-DRB4*01:01L HLA-DRB1*09:01L HLA-DRB3*01:01L HLA-DPA1*01:03-B1*104:01L HLA-DRB1*07:01L HLA-DRB1*08:02L
NTFTRLQSLENVA

SEQ ID NO: 22306 - protein, 13 aa, Severe acute respiratory syndrome coronavirus 2
  REGION 1..13: note = Table B: HLA-DRB1*14:02L
LENVAFNVVNKGH

SEQ ID NO: 22307 - protein, 12 aa, Severe acute respiratory syndrome coronavirus 2
  REGION 1..12: note = Table B: HLA-DRB1*14:02L
SIINNTVYTKVD

SEQ ID NO: 22308 - protein, 13 aa, Severe acute respiratory syndrome coronavirus 2
  REGION 1..13: note = Table B: HLA-DRB1*14:02L
GVDIAANTVIWDY

SEQ ID NO: 22309 - protein, 15 aa, Severe acute respiratory syndrome coronavirus 2
  REGION 1..15: note = Table B: HLA-DRB1*14:02L
DGQVDLFRNARNGVL

SEQ ID NO: 22310 - protein, 14 aa, Severe acute respiratory syndrome coronavirus 2
  REGION 1..14: note = Table B: HLA-DRB1*14:02L HLA-DPA1*01:03-B1*04:02L
EFIERYKLEGYAFE

SEQ ID NO: 22311 - protein, 15 aa, Severe acute respiratory syndrome coronavirus 2
  REGION 1..15: note = Table B: HLA-DRB1*14:02L HLA-DQA1*05:05-B1*03:01L
IERYKLEGYAFEHIV

SEQ ID NO: 22312 - protein, 14 aa, Severe acute respiratory syndrome coronavirus 2
  REGION 1..14: note = Table B: HLA-DRB1*14:02L
LLLDDFVEIIKSQD

SEQ ID NO: 22313 - protein, 16 aa, Severe acute respiratory syndrome coronavirus 2
  REGION 1..16: note = Table B: HLA-DRB1*14:02L
SQDLSVVSKVVKVTID

SEQ ID NO: 22314 - protein, 18 aa, Severe acute respiratory syndrome coronavirus 2
  REGION 1..18: note = Table B: HLA-DRB1*14:02L HLA-DQA1*05:05-B1*03:01L
IDYTEISFMLWCKDGHVE

SEQ ID NO: 22315 - protein, 18 aa, Severe acute respiratory syndrome coronavirus 2
  REGION 1..18: note = Table B: HLA-DRB1*14:02L
ISFMLWCKDGHVETFYPK

SEQ ID NO: 22316 - protein, 16 aa, Severe acute respiratory syndrome coronavirus 2
  REGION 1..16: note = Table B: HLA-DRB1*14:02L HLA-DRB1*08:02L
DGHVETFYPKLQSSQA

SEQ ID NO: 22317 - protein, 14 aa, Severe acute respiratory syndrome coronavirus 2
  REGION 1..14: note = Table B: HLA-DRB1*14:02L HLA-DQA1*01:03-B1*06:01L
VAKYTQLCQYLNTL

SEQ ID NO: 22318 - protein, 17 aa, Severe acute respiratory syndrome coronavirus 2
  REGION 1..17: note = Table B: HLA-DRB1*14:02L HLA-DPA1*01:03-B1*04:01L HLA-DRB1*08:03L
VPYNMRVIHFGAGSDKG

SEQ ID NO: 22319 - protein, 16 aa, Severe acute respiratory syndrome coronavirus 2
  REGION 1..16: note = Table B: HLA-DRB1*14:02L
KLALGGSVAIKITEHS

SEQ ID NO: 22320 - protein, 16 aa, Severe acute respiratory syndrome coronavirus 2
  REGION 1..16: note = Table B: HLA-DRB1*14:02L
SEAFLIGCNYLGKPRE

SEQ ID NO: 22321 - protein, 15 aa, Severe acute respiratory syndrome coronavirus 2
  REGION 1..15: note = Table B: HLA-DRB1*14:02L
INDMILSLLSKGRLI

SEQ ID NO: 22322 - protein, 16 aa, Severe acute respiratory syndrome coronavirus 2
  REGION 1..16: note = Table B: HLA-DRB1*14:02L
NDMILSLLSKGRLIIR

SEQ ID NO: 22323 - protein, 17 aa, Severe acute respiratory syndrome coronavirus 2
  REGION 1..17: note = Table B: HLA-DRB1*14:02L
DMILSLLSKGRLIIREN

SEQ ID NO: 22324 - protein, 11 aa, Severe acute respiratory syndrome coronavirus 2
  REGION 1..11: note = Table B: HLA-DRB1*14:02L HLA-DQA1*05:05-B1*03:19L HLA-DPA1*01:03-B1*04:01L HLA-DPA1*01:03-B1*04:02L HLA-DPA1*03:01-B1*105:01L HLA-DQA1*02:01-B1*03:03L
RVYSSANNCTF

SEQ ID NO: 22325 - protein, 13 aa, Severe acute respiratory syndrome coronavirus 2
  REGION 1..13: note = Table B: HLA-DRB1*14:02L
ALEPLVDLPIGIN

SEQ ID NO: 22326 - protein, 16 aa, Severe acute respiratory syndrome coronavirus 2
  REGION 1..16: note = Table B: HLA-DRB1*14:02L
GINITRFQTLLALHRS

SEQ ID NO: 22327 - protein, 15 aa, Severe acute respiratory syndrome coronavirus 2
  REGION 1..15: note = Table B: HLA-DRB1*14:02L
ITRFQTLLALHRSYL

SEQ ID NO: 22328 - protein, 16 aa, Severe acute respiratory syndrome coronavirus 2
  REGION 1..16: note = Table B: HLA-DRB1*14:02L
SFSTFKCYGVSPTKLN

SEQ ID NO: 22329 - protein, 16 aa, Severe acute respiratory syndrome coronavirus 2
  REGION 1..16: note = Table B: HLA-DRB1*14:02L
FSTFKCYGVSPTKLND

SEQ ID NO: 22330 - protein, 15 aa, Severe acute respiratory syndrome coronavirus 2
  REGION 1..15: note = Table B: HLA-DRB1*14:02L
STNLVKNKCVNFNFN

SEQ ID NO: 22331 - protein, 14 aa, Severe acute respiratory syndrome coronavirus 2
  REGION 1..14: note = Table B: HLA-DRB1*14:02L
NFNFNGLTGTGVLT

SEQ ID NO: 22332 - protein, 15 aa, Severe acute respiratory syndrome coronavirus 2
  REGION 1..15: note = Table B: HLA-DRB1*14:02L HLA-DRB1*07:01L
NKKFLPFQQFGRDIA

SEQ ID NO: 22333 - protein, 16 aa, Severe acute respiratory syndrome coronavirus 2
  REGION 1..16: note = Table B: HLA-DRB1*14:02L
KKFLPFQQFGRDIADT

SEQ ID NO: 22334 - protein, 16 aa, Severe acute respiratory syndrome coronavirus 2
  REGION 1..16: note = Table B: HLA-DRB1*14:02L HLA-DPA1*01:03-B1*04:02L
SNVFQTRAGCLIGAEH

SEQ ID NO: 22335 - protein, 15 aa, Severe acute respiratory syndrome coronavirus 2
  REGION 1..15: note = Table B: HLA-DRB1*14:02L
SNLLLQYGSFCTQLN

SEQ ID NO: 22336 - protein, 18 aa, Severe acute respiratory syndrome coronavirus 2
  REGION 1..18: note = Table B: HLA-DRB1*14:02L HLA-DPA1*01:03-B1*04:01L HLA-DPA1*01:03-B1*04:02L HLA-DPA1*01:03-B1*104:01L
TPPIKDFGGFNFSQILPD

SEQ ID NO: 22337 - protein, 15 aa, Severe acute respiratory syndrome coronavirus 2
  REGION 1..15: note = Table B: HLA-DRB1*14:02L HLA-DRB1*07:01L
QTYVTQQLIRAAEIR

SEQ ID NO: 22338 - protein, 15 aa, Severe acute respiratory syndrome coronavirus 2
  REGION 1..15: note = Table B: HLA-DRB1*14:02L HLA-DRB1*11:01L HLA-DPA1*01:02-B1*04:01L
VTQQLIRAAEIRASA

SEQ ID NO: 22339 - protein, 11 aa, Severe acute respiratory syndrome coronavirus 2
  REGION 1..11: note = Table B: HLA-DRB1*14:02L
MSFPQSAPHGV

SEQ ID NO: 22340 - protein, 16 aa, Severe acute respiratory syndrome coronavirus 2
  REGION 1..16: note = Table B: HLA-DRB1*14:02L HLA-DQA1*01-B1*05L
IQKEIDRLNEVAKNLN

SEQ ID NO: 22341 - protein, 12 aa, Severe acute respiratory syndrome coronavirus 2
  REGION 1..12: note = Table B: HLA-DRB1*14:02L HLA-DPA1*01:03-B1*104:01L
VRATATIPIQAS

SEQ ID NO: 22342 - protein, 13 aa, Severe acute respiratory syndrome coronavirus 2
  REGION 1..13: note = Table B: HLA-DRB1*14:02L HLA-DQA1*05:05-B1*03:19L HLA-DRB1*13:01L HLA-DQA1*05:05-B1*03:116L HLA-DPA1*01:03-B1*04:02L HLA-DRB1*14:54L HLA-DRB1*08:02L HLA-DRB1*08:03L
SKIITLKKRWQLA

SEQ ID NO: 22343 - protein, 16 aa, Severe acute respiratory syndrome coronavirus 2
  REGION 1..16: note = Table B: HLA-DRB1*14:02L
SSIVITSGDGTTSPIS

SEQ ID NO: 22344 - protein, 16 aa, Severe acute respiratory syndrome coronavirus 2
  REGION 1..16: note = Table B: HLA-DRB1*14:02L HLA-DRB1*15:03L
IVITSGDGTTSPISEH

SEQ ID NO: 22345 - protein, 11 aa, Severe acute respiratory syndrome coronavirus 2
  REGION 1..11: note = Table B: HLA-DRB1*14:02L
QLSTDTGVEHV

SEQ ID NO: 22346 - protein, 12 aa, Severe acute respiratory syndrome coronavirus 2
  REGION 1..12: note = Table B: HLA-DRB1*14:02L HLA-DQA1*05:05-B1*03:19L
FIYNKIVDEPEE

SEQ ID NO: 22347 - protein, 15 aa, Severe acute respiratory syndrome coronavirus 2
  REGION 1..15: note = Table B: HLA-DRB1*14:02L
YSRVKNLNSSRVPDL

SEQ ID NO: 22348 - protein, 15 aa, Severe acute respiratory syndrome coronavirus 2
  REGION 1..15: note = Table B: HLA-DRB1*14:02L
SRVKNLNSSRVPDLL

SEQ ID NO: 22349 - protein, 16 aa, Severe acute respiratory syndrome coronavirus 2
  REGION 1..16: note = Table B: HLA-DRB1*14:02L
LQFAYANRNRFLYIIK

SEQ ID NO: 22350 - protein, 15 aa, Severe acute respiratory syndrome coronavirus 2
  REGION 1..15: note = Table B: HLA-DRB1*14:02L
IASFRLFARTRSMWS

SEQ ID NO: 22351 - protein, 20 aa, Severe acute respiratory syndrome coronavirus 2
  REGION 1..20: note = Table B: HLA-DRB1*14:02L
VPLHGTILTRPLLESELVIG

SEQ ID NO: 22352 - protein, 17 aa, Severe acute respiratory syndrome coronavirus 2
  REGION 1..17: note = Table B: HLA-DRB1*14:02L
GAVILRGHLRIAGHHLG

SEQ ID NO: 22353 - protein, 13 aa, Severe acute respiratory syndrome coronavirus 2
  REGION 1..13: note = Table B: HLA-DRB1*14:02L
NYKLNTDHSSSSD

SEQ ID NO: 22354 - protein, 16 aa, Severe acute respiratory syndrome coronavirus 2
  REGION 1..16: note = Table B: HLA-DRB1*14:02L
EILLIIMRTFKVSIWN

SEQ ID NO: 22355 - protein, 15 aa, Severe acute respiratory syndrome coronavirus 2
  REGION 1..15: note = Table B: HLA-DRB1*14:02L
ELYHYQECVRGTTVL

SEQ ID NO: 22356 - protein, 13 aa, Severe acute respiratory syndrome coronavirus 2
  REGION 1..13: note = Table B: HLA-DRB1*14:02L HLA-DPA1*01:03-B1*04:02L HLA-DPA1*02:01-B1*13:01L HLA-DPA1*03:01-B1*105:01L HLA-DPA1*01:03-B1*02:01L HLA-DRB1*07:01L HLA-DQA1*01:03-B1*06:01L HLA-DRB1*08:02L
HVYQLRARSVSPK

SEQ ID NO: 22357 - protein, 16 aa, Severe acute respiratory syndrome coronavirus 2
  REGION 1..16: note = Table B: HLA-DRB1*14:02L HLA-DQA1*05:05-B1*03:116L HLA-DPA1*02:01-B1*13:01L
YFYYLGTGPEAGLPYG

SEQ ID NO: 22358 - protein, 16 aa, Severe acute respiratory syndrome coronavirus 2
  REGION 1..16: note = Table B: HLA-DRB1*14:02L
GGDAALALLLLDRLNQ

SEQ ID NO: 22359 - protein, 13 aa, Severe acute respiratory syndrome coronavirus 2
  REGION 1..13: note = Table B: HLA-DRB1*14:02L HLA-DPA1*02:01-B1*13:01L
FGDQELIRQGTDY

SEQ ID NO: 22360 - protein, 16 aa, Severe acute respiratory syndrome coronavirus 2
  REGION 1..16: note = Table B: HLA-DRB1*14:02L HLA-DRB3*01:01L HLA-DPA1*01:03-B1*104:01L HLA-DRB1*07:01L
SKQLQQSMSSADSTQA

SEQ ID NO: 22361 - protein, 13 aa, Severe acute respiratory syndrome coronavirus 2
  REGION 1..13: note = Table B: HLA-DQA1*01:01-B1*05:01L
ELNGGAYTRYVDN

SEQ ID NO: 22362 - protein, 16 aa, Severe acute respiratory syndrome coronavirus 2
  REGION 1..16: note = Table B: HLA-DQA1*01:01-B1*05:01L HLA-DQA1*05:05-B1*03:19L HLA-DPA1*03:01-B1*105:01L HLA-DQA1*05:05-B1*03:01L
EDEEEGDCEEEEFEPS

SEQ ID NO: 22363 - protein, 14 aa, Severe acute respiratory syndrome coronavirus 2
  REGION 1..14: note = Table B: HLA-DQA1*01:01-B1*05:01L HLA-DRB1*08:01L HLA-DRB1*13:01L
EEEEFEPSTQYEYG

SEQ ID NO: 22364 - protein, 15 aa, Severe acute respiratory syndrome coronavirus 2
  REGION 1..15: note = Table B: HLA-DQA1*01:01-B1*05:01L HLA-DRB1*15:03L
NQTTTIQTIVEVQPQ

SEQ ID NO: 22365 - protein, 11 aa, Severe acute respiratory syndrome coronavirus 2
  REGION 1..11: note = Table B: HLA-DQA1*01:01-B1*05:01L
VAGALNKATNN

SEQ ID NO: 22366 - protein, 15 aa, Severe acute respiratory syndrome coronavirus 2
  REGION 1..15: note = Table B: HLA-DQA1*01:01-B1*05:01L HLA-DPA1*01:03-B1*104:01L HLA-DRB1*08:03L
IQLLKSAYENFNQHE

SEQ ID NO: 22367 - protein, 15 aa, Severe acute respiratory syndrome coronavirus 2
  REGION 1..15: note = Table B: HLA-DQA1*01:01-B1*05:01L
TNVYLAVFDKNLYDK

SEQ ID NO: 22368 - protein, 13 aa, Severe acute respiratory syndrome coronavirus 2
  REGION 1..13: note = Table B: HLA-DQA1*01:01-B1*05:01L HLA-DPA1*01:02-B1*04:01L
FLEMKSEKQVEQK

SEQ ID NO: 22369 - protein, 11 aa, Severe acute respiratory syndrome coronavirus 2
  REGION 1..11: note = Table B: HLA-DQA1*01:01-B1*05:01L
EEVTTTLEETK

SEQ ID NO: 22370 - protein, 11 aa, Severe acute respiratory syndrome coronavirus 2
  REGION 1..11: note = Table B: HLA-DQA1*01:01-B1*05:01L
DNINLHTQVVD

SEQ ID NO: 22371 - protein, 12 aa, Severe acute respiratory syndrome coronavirus 2
  REGION 1..12: note = Table B: HLA-DQA1*01:01-B1*05:01L
TFYVLPNDDTLR

SEQ ID NO: 22372 - protein, 14 aa, Severe acute respiratory syndrome coronavirus 2
  REGION 1..14: note = Table B: HLA-DQA1*01:01-B1*05:01L HLA-DRB1*08:03L
IELKFNPPALQDAY

SEQ ID NO: 22373 - protein, 14 aa, Severe acute respiratory syndrome coronavirus 2
  REGION 1..14: note = Table B: HLA-DQA1*01:01-B1*05:01L HLA-DRB4*02:01NL HLA-DRB1*13:01L HLA-DPA1*01:03-B1*02:01L
SPFVMMSAPPAQYE

SEQ ID NO: 22374 - protein, 14 aa, Severe acute respiratory syndrome coronavirus 2
  REGION 1..14: note = Table B: HLA-DQA1*01:01-B1*05:01L
GDVVAIDYKHYTPS

SEQ ID NO: 22375 - protein, 13 aa, Severe acute respiratory syndrome coronavirus 2
  REGION 1..13: note = Table B: HLA-DQA1*01:01-B1*05:01L HLA-DRB1*04:10L HLA-DPA1*02:01-B1*13:01L HLA-DQA1*05:05-B1*03:01L
VNNATNKATYKPN

SEQ ID NO: 22376 - protein, 13 aa, Severe acute respiratory syndrome coronavirus 2
  REGION 1..13: note = Table B: HLA-DQA1*01:01-B1*05:01L HLA-DRB4*01:01L HLA-DPA1*01:03-B1*104:01L HLA-DRB1*08:02L
NSFDVLKSEDAQG

SEQ ID NO: 22377 - protein, 14 aa, Severe acute respiratory syndrome coronavirus 2
  REGION 1..14: note = Table B: HLA-DQA1*01:01-B1*05:01L HLA-DRB1*08:01L
ATHGLAAVNSVPWD

SEQ ID NO: 22378 - protein, 13 aa, Severe acute respiratory syndrome coronavirus 2
  REGION 1..13: note = Table B: HLA-DQA1*01:01-B1*05:01L HLA-DPA1*01:03-B1*02:01L HLA-DRB1*08:02L
LNKVVSTTTNIVT

SEQ ID NO: 22379 - protein, 14 aa, Severe acute respiratory syndrome coronavirus 2
  REGION 1..14: note = Table B: HLA-DQA1*01:01-B1*05:01L
YREGYLNSTNVTIA

SEQ ID NO: 22380 - protein, 15 aa, Severe acute respiratory syndrome coronavirus 2
  REGION 1..15: note = Table B: HLA-DQA1*01:01-B1*05:01L HLA-DRB1*08:01L HLA-DPA1*02:01-B1*13:01L
LSGLDSLDTYPSLET

SEQ ID NO: 22381 - protein, 14 aa, Severe acute respiratory syndrome coronavirus 2
  REGION 1..14: note = Table B: HLA-DQA1*01:01-B1*05:01L
RPINPTDQSSYIVD

SEQ ID NO: 22382 - protein, 13 aa, Severe acute respiratory syndrome coronavirus 2
  REGION 1..13: note = Table B: HLA-DQA1*01:01-B1*05:01L HLA-DRB1*04:08L
ESSAKSASVYYSQ

SEQ ID NO: 22383 - protein, 12 aa, Severe acute respiratory syndrome coronavirus 2
  REGION 1..12: note = Table B: HLA-DQA1*01:01-B1*05:01L
QGFVDSDVETKD

SEQ ID NO: 22384 - protein, 14 aa, Severe acute respiratory syndrome coronavirus 2
  REGION 1..14: note = Table B: HLA-DQA1*01:01-B1*05:01L
TTRQVVNVVTTKIA

SEQ ID NO: 22385 - protein, 16 aa, Severe acute respiratory syndrome coronavirus 2
  REGION 1..16: note = Table B: HLA-DQA1*01:01-B1*05:01L HLA-DRB4*01:01L HLA-DQA1*05:05-B1*03:116L HLA-DRB1*09:01L HLA-DRB1*12:02L HLA-DRB1*15:01L
SGRWVLNNDYYRSLPG

SEQ ID NO: 22386 - protein, 12 aa, Severe acute respiratory syndrome coronavirus 2
  REGION 1..12: note = Table B: HLA-DQA1*01:01-B1*05:01L
SGAMDTTSYREA

SEQ ID NO: 22387 - protein, 12 aa, Severe acute respiratory syndrome coronavirus 2
  REGION 1..12: note = Table B: HLA-DQA1*01:01-B1*05:01L HLA-DPA1*02:01-B1*13:01L
GAMDTTSYREAA

SEQ ID NO: 22388 - protein, 14 aa, Severe acute respiratory syndrome coronavirus 2
  REGION 1..14: note = Table B: HLA-DQA1*01:01-B1*05:01L
NGRTILGSALLEDE

SEQ ID NO: 22389 - protein, 11 aa, Severe acute respiratory syndrome coronavirus 2
  REGION 1..11: note = Table B: HLA-DQA1*01:01-B1*05:01L HLA-DPA1*01:03-B1*04:02L HLA-DRB1*12:02L HLA-DPA1*01:02-B1*04:01L
DMVDTSLSGFK

SEQ ID NO: 22390 - protein, 11 aa, Severe acute respiratory syndrome coronavirus 2
  REGION 1..11: note = Table B: HLA-DQA1*01:01-B1*05:01L
SMQGAVDINKL

SEQ ID NO: 22391 - protein, 15 aa, Severe acute respiratory syndrome coronavirus 2
  REGION 1..15: note = Table B: HLA-DQA1*01:01-B1*05:01L HLA-DRB4*01:01L HLA-DPA1*01:02-B1*04:01L HLA-DRB1*15:01L
IASEFSSLPSYAAFA

SEQ ID NO: 22392 - protein, 14 aa, Severe acute respiratory syndrome coronavirus 2
  REGION 1..14: note = Table B: HLA-DQA1*01:01-B1*05:01L HLA-DRB3*01:01L HLA-DRB1*07:01L HLA-DRB1*15:03L
LKKSLNVAKSEFDR

SEQ ID NO: 22393 - protein, 14 aa, Severe acute respiratory syndrome coronavirus 2
  REGION 1..14: note = Table B: HLA-DQA1*01:01-B1*05:01L
VDADSKIVQLSEIS

SEQ ID NO: 22394 - protein, 12 aa, Severe acute respiratory syndrome coronavirus 2
  REGION 1..12: note = Table B: HLA-DQA1*01:01-B1*05:01L HLA-DRB1*09:01L HLA-DPA1*01:03-B1*02:01L HLA-DRB1*07:01L
FAVDAAKAYKDY

SEQ ID NO: 22395 - protein, 15 aa, Severe acute respiratory syndrome coronavirus 2
  REGION 1..15: note = Table B: HLA-DQA1*01:01-B1*05:01L HLA-DQA1*05:05-B1*03:19L HLA-DPA1*01:03-B1*04:01L HLA-DRB1*10:01L
AAKAYKDYLASGGQP

SEQ ID NO: 22396 - protein, 14 aa, Severe acute respiratory syndrome coronavirus 2
  REGION 1..14: note = Table B: HLA-DQA1*01:01-B1*05:01L
DEDDNLIDSYFVVK

SEQ ID NO: 22397 - protein, 13 aa, Severe acute respiratory syndrome coronavirus 2
  REGION 1..13: note = Table B: HLA-DQA1*01:01-B1*05:01L HLA-DRB1*08:01L HLA-DQA1*05:01-B1*02:01L HLA-DRB1*12:01L HLA-DPA1*02:01-B1*13:01L
LTRALTAESHVDT

SEQ ID NO: 22398 - protein, 13 aa, Severe acute respiratory syndrome coronavirus 2
  REGION 1..13: note = Table B: HLA-DQA1*01:01-B1*05:01L
ALTAESHVDTDLT

SEQ ID NO: 22399 - protein, 15 aa, Severe acute respiratory syndrome coronavirus 2
  REGION 1..15: note = Table B: HLA-DQA1*01:01-B1*05:01L
ELLVYAADPAMHAAS

SEQ ID NO: 22400 - protein, 14 aa, Severe acute respiratory syndrome coronavirus 2
  REGION 1..14: note = Table B: HLA-DQA1*01:01-B1*05:01L HLA-DPA1*01:03-B1*04:01L HLA-DPA1*01:03-B1*02:01L
VYAADPAMHAASGN

SEQ ID NO: 22401 - protein, 13 aa, Severe acute respiratory syndrome coronavirus 2
  REGION 1..13: note = Table B: HLA-DQA1*01:01-B1*05:01L
AADPAMHAASGNL

SEQ ID NO: 22402 - protein, 15 aa, Severe acute respiratory syndrome coronavirus 2
  REGION 1..15: note = Table B: HLA-DQA1*01:01-B1*05:01L HLA-DRB4*01:01L
DYYRYNLPTMCDIRQ

SEQ ID NO: 22403 - protein, 12 aa, Severe acute respiratory syndrome coronavirus 2
  REGION 1..12: note = Table B: HLA-DQA1*01:01-B1*05:01L HLA-DQA1*01-B1*05L HLA-DQA1*05:05-B1*03:01L HLA-DRB1*16:01L
NANQVIVNNLDK

SEQ ID NO: 22404 - protein, 14 aa, Severe acute respiratory syndrome coronavirus 2
  REGION 1..14: note = Table B: HLA-DQA1*01:01-B1*05:01L HLA-DRB5*01:01L HLA-DRB4*02:01NL HLA-DRB4*01:01L HLA-DRB1*09:01L HLA-DRB1*15:01L
DALFAYTKRNVIPT

SEQ ID NO: 22405 - protein, 13 aa, Severe acute respiratory syndrome coronavirus 2
  REGION 1..13: note = Table B: HLA-DQA1*01:01-B1*05:01L HLA-DQA1*05:05-B1*03:19L HLA-DQA1*05:05-B1*03:01L HLA-DRB1*04:08L
LPYPDPSRILGAG

SEQ ID NO: 22406 - protein, 16 aa, Severe acute respiratory syndrome coronavirus 2
  REGION 1..16: note = Table B: HLA-DQA1*01:01-B1*05:01L HLA-DRB4*02:01NL HLA-DRB1*15:01L
SVMLTNDNTSRYWEPE

SEQ ID NO: 22407 - protein, 15 aa, Severe acute respiratory syndrome coronavirus 2
  REGION 1..15: note = Table B: HLA-DQA1*01:01-B1*05:01L
AVVYRGTTTYKLNVG

SEQ ID NO: 22408 - protein, 11 aa, Severe acute respiratory syndrome coronavirus 2
  REGION 1..11: note = Table B: HLA-DQA1*01:01-B1*05:01L HLA-DQA1*05:05-B1*03:19L
GDPAQLPAPRT

SEQ ID NO: 22409 - protein, 12 aa, Severe acute respiratory syndrome coronavirus 2
  REGION 1..12: note = Table B: HLA-DQA1*01:01-B1*05:01L
LTKGTLEPEYFN

SEQ ID NO: 22410 - protein, 16 aa, Severe acute respiratory syndrome coronavirus 2
  REGION 1..16: note = Table B: HLA-DQA1*01:01-B1*05:01L HLA-DPA1*01:03-B1*04:01L
VSALVYDNKLKAHKDK

SEQ ID NO: 22411 - protein, 14 aa, Severe acute respiratory syndrome coronavirus 2
  REGION 1..14: note = Table B: HLA-DQA1*01:01-B1*05:01L
YKGVITHDVSSAIN

SEQ ID NO: 22412 - protein, 15 aa, Severe acute respiratory syndrome coronavirus 2
  REGION 1..15: note = Table B: HLA-DQA1*01:01-B1*05:01L
KGVITHDVSSAINRP

SEQ ID NO: 22413 - protein, 14 aa, Severe acute respiratory syndrome coronavirus 2
  REGION 1..14: note = Table B: HLA-DQA1*01:01-B1*05:01L HLA-DRB1*11:01L HLA-DRB4*01:01L HLA-DPA1*01:03-B1*04:01L HLA-DPA1*01:03-B1*04:02L HLA-DRB3*01:01L
VASKILGLPTQTVD

SEQ ID NO: 22414 - protein, 13 aa, Severe acute respiratory syndrome coronavirus 2
  REGION 1..13: note = Table B: HLA-DQA1*01:01-B1*05:01L HLA-DRB1*08:02L
GFKMNYQVNGYPN

SEQ ID NO: 22415 - protein, 16 aa, Severe acute respiratory syndrome coronavirus 2
  REGION 1..16: note = Table B: HLA-DQA1*01:01-B1*05:01L HLA-DPA1*02:01-B1*13:01L HLA-DQA1*05:05-B1*03:01L
TPNNTDFSRVSAKPPP

SEQ ID NO: 22416 - protein, 13 aa, Severe acute respiratory syndrome coronavirus 2
  REGION 1..13: note = Table B: HLA-DQA1*01:01-B1*05:01L HLA-DQA1*05:05-B1*03:01L
FHTPAFDKSAFVN

SEQ ID NO: 22417 - protein, 12 aa, Severe acute respiratory syndrome coronavirus 2
  REGION 1..12: note = Table B: HLA-DQA1*01:01-B1*05:01L HLA-DQA1*05:01-B1*02:01L HLA-DQA1*05:05-B1*03:01L
GQQGEVPVSIIN

SEQ ID NO: 22418 - protein, 16 aa, Severe acute respiratory syndrome coronavirus 2
  REGION 1..16: note = Table B: HLA-DQA1*01:01-B1*05:01L HLA-DRB4*02:01NL HLA-DRB1*13:01L HLA-DRB1*15:01L
VPVSIINNTVYTKVDG

SEQ ID NO: 22419 - protein, 14 aa, Severe acute respiratory syndrome coronavirus 2
  REGION 1..14: note = Table B: HLA-DQA1*01:01-B1*05:01L HLA-DRB1*04:08L
DADSTLIGDCATVH

SEQ ID NO: 22420 - protein, 15 aa, Severe acute respiratory syndrome coronavirus 2
  REGION 1..15: note = Table B: HLA-DQA1*01:01-B1*05:01L
IFWRNTNPIQLSSYS

SEQ ID NO: 22421 - protein, 13 aa, Severe acute respiratory syndrome coronavirus 2
  REGION 1..13: note = Table B: HLA-DQA1*01:01-B1*05:01L HLA-DRB1*14:54L HLA-DRB1*04:08L
LTTRTQLPPAYTN

SEQ ID NO: 22422 - protein, 16 aa, Severe acute respiratory syndrome coronavirus 2
  REGION 1..16: note = Table B: HLA-DQA1*01:01-B1*05:01L HLA-DRB1*09:01L
TRGVYYPDKVFRSSVL

SEQ ID NO: 22423 - protein, 11 aa, Severe acute respiratory syndrome coronavirus 2
  REGION 1..11: note = Table B: HLA-DQA1*01:01-B1*05:01L
GVYFASTEKSN

SEQ ID NO: 22424 - protein, 14 aa, Severe acute respiratory syndrome coronavirus 2
  REGION 1..14: note = Table B: HLA-DQA1*01:01-B1*05:01L HLA-DPA1*02:01-B1*13:01L HLA-DPA1*01:03-B1*104:01L
SKTQSLLIVNNATN

SEQ ID NO: 22425 - protein, 13 aa, Severe acute respiratory syndrome coronavirus 2
  REGION 1..13: note = Table B: HLA-DQA1*01:01-B1*05:01L
IYQTSNFRVQPTE

SEQ ID NO: 22426 - protein, 12 aa, Severe acute respiratory syndrome coronavirus 2
  REGION 1..12: note = Table B: HLA-DQA1*01:01-B1*05:01L HLA-DRB1*16:01L HLA-DRB1*04:08L
DYNYKLPDDFTG

SEQ ID NO: 22427 - protein, 12 aa, Severe acute respiratory syndrome coronavirus 2
  REGION 1..12: note = Table B: HLA-DQA1*01:01-B1*05:01L HLA-DQA1*05:05-B1*03:01L
TTDAVRDPQTLE

SEQ ID NO: 22428 - protein, 14 aa, Severe acute respiratory syndrome coronavirus 2
  REGION 1..14: note = Table B: HLA-DQA1*01:01-B1*05:01L
GAENSVAYSNNSIA

SEQ ID NO: 22429 - protein, 12 aa, Severe acute respiratory syndrome coronavirus 2
  REGION 1..12: note = Table B: HLA-DQA1*01:01-B1*05:01L HLA-DPA1*03:01-B1*105:01L HLA-DQA1*05:05-B1*03:01L
GVTQNVLYENQK

SEQ ID NO: 22430 - protein, 14 aa, Severe acute respiratory syndrome coronavirus 2
  REGION 1..14: note = Table B: HLA-DQA1*01:01-B1*05:01L HLA-DPA1*02:01-B1*13:01L
YEPQIITTDNTFVS

SEQ ID NO: 22431 - protein, 11 aa, Severe acute respiratory syndrome coronavirus 2
  REGION 1..11: note = Table B: HLA-DQA1*01:01-B1*05:01L
TTSPISEHDYQ

SEQ ID NO: 22432 - protein, 13 aa, Severe acute respiratory syndrome coronavirus 2
  REGION 1..13: note = Table B: HLA-DQA1*01:01-B1*05:01L
DGSSGVVNPVMEP

SEQ ID NO: 22433 - protein, 14 aa, Severe acute respiratory syndrome coronavirus 2
  REGION 1..14: note = Table B: HLA-DQA1*01:01-B1*05:01L
GSKSPIQYIDIGNY

SEQ ID NO: 22434 - protein, 13 aa, Severe acute respiratory syndrome coronavirus 2
  REGION 1..13: note = Table B: HLA-DQA1*01:01-B1*05:01L HLA-DRB1*08:01L
GTGPEAGLPYGAN

SEQ ID NO: 22435 - protein, 14 aa, Severe acute respiratory syndrome coronavirus 2
  REGION 1..14: note = Table B: HLA-DQA1*01:01-B1*05:01L HLA-DPA1*01:03-B1*04:02L HLA-DPA1*03:01-B1*105:01L
EGSRGGSQASSRSS

SEQ ID NO: 22436 - protein, 14 aa, Severe acute respiratory syndrome coronavirus 2
  REGION 1..14: note = Table B: HLA-DQA1*01:01-B1*05:01L HLA-DRB1*04:10L HLA-DRB1*04:08L
TSPARMAGNGGDAA

SEQ ID NO: 22437 - protein, 11 aa, Severe acute respiratory syndrome coronavirus 2
  REGION 1..11: note = Table B: HLA-DQA1*01:01-B1*05:01L HLA-DQA1*05:05-B1*03:19L
ADETQALPQRQ

SEQ ID NO: 22438 - protein, 13 aa, Severe acute respiratory syndrome coronavirus 2
  REGION 1..13: note = Table B: HLA-DRB1*08:01L HLA-DQA1*01-B1*05L HLA-DPA1*01:02-B1*04:01L
ELEGIQYGRSGET

SEQ ID NO: 22439 - protein, 12 aa, Severe acute respiratory syndrome coronavirus 2
  REGION 1..12: note = Table B: HLA-DRB1*08:01L
RKVLLRKNGNKG

SEQ ID NO: 22440 - protein, 14 aa, Severe acute respiratory syndrome coronavirus 2
  REGION 1..14: note = Table B: HLA-DRB1*08:01L HLA-DRB1*12:01L HLA-DRB1*16:01L
KVLLRKNGNKGAGG

SEQ ID NO: 22441 - protein, 13 aa, Severe acute respiratory syndrome coronavirus 2
  REGION 1..13: note = Table B: HLA-DRB1*08:01L
TKRGVYCCREHEH

SEQ ID NO: 22442 - protein, 12 aa, Severe acute respiratory syndrome coronavirus 2
  REGION 1..12: note = Table B: HLA-DRB1*08:01L
PFEIKLAKKFDT

SEQ ID NO: 22443 - protein, 11 aa, Severe acute respiratory syndrome coronavirus 2
  REGION 1..11: note = Table B: HLA-DRB1*08:01L
IIKTIQPRVEK

SEQ ID NO: 22444 - protein, 12 aa, Severe acute respiratory syndrome coronavirus 2
  REGION 1..12: note = Table B: HLA-DRB1*08:01L HLA-DQA1*03:01-B1*03:02L
IQPRVEKKKLDG

SEQ ID NO: 22445 - protein, 14 aa, Severe acute respiratory syndrome coronavirus 2
  REGION 1..14: note = Table B: HLA-DRB1*08:01L
LDGFMGRIRSVYPV

SEQ ID NO: 22446 - protein, 12 aa, Severe acute respiratory syndrome coronavirus 2
  REGION 1..12: note = Table B: HLA-DRB1*08:01L
TSWQTGDFVKAT

SEQ ID NO: 22447 - protein, 15 aa, Severe acute respiratory syndrome coronavirus 2
  REGION 1..15: note = Table B: HLA-DRB1*08:01L
VVKIYCPACHNSEVG

SEQ ID NO: 22448 - protein, 14 aa, Severe acute respiratory syndrome coronavirus 2
  REGION 1..14: note = Table B: HLA-DRB1*08:01L HLA-DRB1*16:01L HLA-DRB1*04:08L
VGPEHSLAEYHNES

SEQ ID NO: 22449 - protein, 15 aa, Severe acute respiratory syndrome coronavirus 2
  REGION 1..15: note = Table B: HLA-DRB1*08:01L
EGLNDNLLEILQKEK

SEQ ID NO: 22450 - protein, 11 aa, Severe acute respiratory syndrome coronavirus 2
  REGION 1..11: note = Table B: HLA-DRB1*08:01L HLA-DQA1*03:01-B1*03:02L HLA-DQA1*05:05-B1*03:01L HLA-DRB1*08:03L
AFVETVKGLDY

SEQ ID NO: 22451 - protein, 13 aa, Severe acute respiratory syndrome coronavirus 2
  REGION 1..13: note = Table B: HLA-DRB1*08:01L
VETVKGLDYKAFK

SEQ ID NO: 22452 - protein, 14 aa, Severe acute respiratory syndrome coronavirus 2
  REGION 1..14: note = Table B: HLA-DRB1*08:01L HLA-DRB1*07:01L HLA-DRB1*15:01L
KAAITILDGISQYS

SEQ ID NO: 22453 - protein, 14 aa, Severe acute respiratory syndrome coronavirus 2
  REGION 1..14: note = Table B: HLA-DRB1*08:01L
KLKPVLDWLEEKFK

SEQ ID NO: 22454 - protein, 13 aa, Severe acute respiratory syndrome coronavirus 2
  REGION 1..13: note = Table B: HLA-DRB1*08:01L
IIGGAKLKALNLG

SEQ ID NO: 22455 - protein, 11 aa, Severe acute respiratory syndrome coronavirus 2
  REGION 1..11: note = Table B: HLA-DRB1*08:01L
GLYRKCVKSRE

SEQ ID NO: 22456 - protein, 10 aa, Severe acute respiratory syndrome coronavirus 2
  REGION 1..10: note = Table B: HLA-DRB1*08:01L
YRKCVKSREE

SEQ ID NO: 22457 - protein, 13 aa, Severe acute respiratory syndrome coronavirus 2
  REGION 1..13: note = Table B: HLA-DRB1*08:01L
EVVLKTGDLQPLE

SEQ ID NO: 22458 - protein, 13 aa, Severe acute respiratory syndrome coronavirus 2
  REGION 1..13: note = Table B: HLA-DRB1*08:01L HLA-DRB1*04:08L
NGLMLLEIKDTEK

SEQ ID NO: 22459 - protein, 12 aa, Severe acute respiratory syndrome coronavirus 2
  REGION 1..12: note = Table B: HLA-DRB1*08:01L
NITFELDERIDK

SEQ ID NO: 22460 - protein, 14 aa, Severe acute respiratory syndrome coronavirus 2
  REGION 1..14: note = Table B: HLA-DRB1*08:01L
QYEYGTEDDYQGKP

SEQ ID NO: 22461 - protein, 14 aa, Severe acute respiratory syndrome coronavirus 2
  REGION 1..14: note = Table B: HLA-DRB1*08:01L HLA-DPA1*02:01-B1*13:01L
ATSAALQPEEEQEE

SEQ ID NO: 22462 - protein, 13 aa, Severe acute respiratory syndrome coronavirus 2
  REGION 1..13: note = Table B: HLA-DRB1*08:01L
SKPSVEQRKQDDK

SEQ ID NO: 22463 - protein, 13 aa, Severe acute respiratory syndrome coronavirus 2
  REGION 1..13: note = Table B: HLA-DRB1*08:01L
MLAKALRKVPTDN

SEQ ID NO: 22464 - protein, 15 aa, Severe acute respiratory syndrome coronavirus 2
  REGION 1..15: note = Table B: HLA-DRB1*08:01L HLA-DPA1*01:02-B1*04:01L HLA-DRB1*04:08L
VVDYGARFYFYTSKT

SEQ ID NO: 22465 - protein, 12 aa, Severe acute respiratory syndrome coronavirus 2
  REGION 1..12: note = Table B: HLA-DRB1*08:01L
RFYFYTSKTTVA

SEQ ID NO: 22466 - protein, 14 aa, Severe acute respiratory syndrome coronavirus 2
  REGION 1..14: note = Table B: HLA-DRB1*08:01L HLA-DRB3*01:01L HLA-DRB1*04:08L
THGLNLEEAARYMR

SEQ ID NO: 22467 - protein, 11 aa, Severe acute respiratory syndrome coronavirus 2
  REGION 1..11: note = Table B: HLA-DRB1*08:01L
GYLTSSSKTPE

SEQ ID NO: 22468 - protein, 11 aa, Severe acute respiratory syndrome coronavirus 2
  REGION 1..11: note = Table B: HLA-DRB1*08:01L
GIEFLKRGDKS

SEQ ID NO: 22469 - protein, 12 aa, Severe acute respiratory syndrome coronavirus 2
  REGION 1..12: note = Table B: HLA-DRB1*08:01L HLA-DRB4*01:01L HLA-DRB1*09:01L HLA-DRB1*12:02L HLA-DRB3*01:01L HLA-DRB1*07:01L HLA-DRB1*08:03L
NLHTQVVDMSMT

SEQ ID NO: 22470 - protein, 13 aa, Severe acute respiratory syndrome coronavirus 2
  REGION 1..13: note = Table B: HLA-DRB1*08:01L HLA-DRB1*15:03L
LNHTKKWKYPQVN

SEQ ID NO: 22471 - protein, 13 aa, Severe acute respiratory syndrome coronavirus 2
  REGION 1..13: note = Table B: HLA-DRB1*08:01L
LQDAYYRARAGEA

SEQ ID NO: 22472 - protein, 12 aa, Severe acute respiratory syndrome coronavirus 2
  REGION 1..12: note = Table B: HLA-DRB1*08:01L HLA-DPA1*01:03-B1*04:02L HLA-DRB1*12:01L HLA-DRB1*15:03L
LFQHANLDSCKR

SEQ ID NO: 22473 - protein, 10 aa, Severe acute respiratory syndrome coronavirus 2
  REGION 1..10: note = Table B: HLA-DRB1*08:01L HLA-DPA1*01:02-B1*04:01L
SYEQFKKGVQ

SEQ ID NO: 22474 - protein, 13 aa, Severe acute respiratory syndrome coronavirus 2
  REGION 1..13: note = Table B: HLA-DRB1*08:01L HLA-DQA1*05:05-B1*03:19L HLA-DPA1*03:01-B1*105:01L HLA-DQA1*05:05-B1*03:01L HLA-DQA1*01:03-B1*06:01L HLA-DQA1*02:01-B1*03:03L
HGTFTCASEYTGN

SEQ ID NO: 22475 - protein, 15 aa, Severe acute respiratory syndrome coronavirus 2
  REGION 1..15: note = Table B: HLA-DRB1*08:01L HLA-DRB1*04:08L
DGALLTKSSEYKGPI

SEQ ID NO: 22476 - protein, 12 aa, Severe acute respiratory syndrome coronavirus 2
  REGION 1..12: note = Table B: HLA-DRB1*08:01L HLA-DQA1*03:01-B1*03:02L
DPKLDNYYKKDN

SEQ ID NO: 22477 - protein, 13 aa, Severe acute respiratory syndrome coronavirus 2
  REGION 1..13: note = Table B: HLA-DRB1*08:01L
HKPIVWHVNNATN

SEQ ID NO: 22478 - protein, 11 aa, Severe acute respiratory syndrome coronavirus 2
  REGION 1..11: note = Table B: HLA-DRB1*08:01L
TTEVVGDIILK

SEQ ID NO: 22479 - protein, 11 aa, Severe acute respiratory syndrome coronavirus 2
  REGION 1..11: note = Table B: HLA-DRB1*08:01L HLA-DPA1*01:03-B1*04:01L HLA-DRB1*04:10L HLA-DRB1*09:01L
AYVDNSSLTIK

SEQ ID NO: 22480 - protein, 12 aa, Severe acute respiratory syndrome coronavirus 2
  REGION 1..12: note = Table B: HLA-DRB1*08:01L HLA-DQA1*01:03-B1*06:01L HLA-DRB1*15:03L
RVLGLKTLATHG

SEQ ID NO: 22481 - protein, 13 aa, Severe acute respiratory syndrome coronavirus 2
  REGION 1..13: note = Table B: HLA-DRB1*08:01L
AKPFLNKVVSTTT

SEQ ID NO: 22482 - protein, 10 aa, Severe acute respiratory syndrome coronavirus 2
  REGION 1..10: note = Table B: HLA-DRB1*08:01L
WKSYVHVVDG

SEQ ID NO: 22483 - protein, 14 aa, Severe acute respiratory syndrome coronavirus 2
  REGION 1..14: note = Table B: HLA-DRB1*08:01L
ARDLSLQFKRPINP

SEQ ID NO: 22484 - protein, 16 aa, Severe acute respiratory syndrome coronavirus 2
  REGION 1..16: note = Table B: HLA-DRB1*08:01L HLA-DPA1*01:03-B1*104:01L
NPTDQSSYIVDSVTVK

SEQ ID NO: 22485 - protein, 12 aa, Severe acute respiratory syndrome coronavirus 2
  REGION 1..12: note = Table B: HLA-DRB1*08:01L
FDKAGQKTYERH

SEQ ID NO: 22486 - protein, 11 aa, Severe acute respiratory syndrome coronavirus 2
  REGION 1..11: note = Table B: HLA-DRB1*08:01L
HFVNLDNLRAN

SEQ ID NO: 22487 - protein, 13 aa, Severe acute respiratory syndrome coronavirus 2
  REGION 1..13: note = Table B: HLA-DRB1*08:01L
FVNLDNLRANNTK

SEQ ID NO: 22488 - protein, 11 aa, Severe acute respiratory syndrome coronavirus 2
  REGION 1..11: note = Table B: HLA-DRB1*08:01L
LSTFISAARQG

SEQ ID NO: 22489 - protein, 14 aa, Severe acute respiratory syndrome coronavirus 2
  REGION 1..14: note = Table B: HLA-DRB1*08:01L HLA-DPA1*01:02-B1*04:01L
AARQGFVDSDVETK

SEQ ID NO: 22490 - protein, 14 aa, Severe acute respiratory syndrome coronavirus 2
  REGION 1..14: note = Table B: HLA-DRB1*08:01L HLA-DQA1*05:05-B1*03:01L
DSDVETKDVVECLK

SEQ ID NO: 22491 - protein, 12 aa, Severe acute respiratory syndrome coronavirus 2
  REGION 1..12: note = Table B: HLA-DRB1*08:01L HLA-DRB1*15:03L
RHINAQVAKSHN

SEQ ID NO: 22492 - protein, 12 aa, Severe acute respiratory syndrome coronavirus 2
  REGION 1..12: note = Table B: HLA-DRB1*08:01L
INAQVAKSHNIA

SEQ ID NO: 22493 - protein, 13 aa, Severe acute respiratory syndrome coronavirus 2
  REGION 1..13: note = Table B: HLA-DRB1*08:01L
IALKGGKIVNNWL

SEQ ID NO: 22494 - protein, 14 aa, Severe acute respiratory syndrome coronavirus 2
  REGION 1..14: note = Table B: HLA-DRB1*08:01L HLA-DRB1*11:01L HLA-DRB3*01:01L
IFYLITPVHVMSKH

SEQ ID NO: 22495 - protein, 12 aa, Severe acute respiratory syndrome coronavirus 2
  REGION 1..12: note = Table B: HLA-DRB1*08:01L
TCFANKHADFDT

SEQ ID NO: 22496 - protein, 14 aa, Severe acute respiratory syndrome coronavirus 2
  REGION 1..14: note = Table B: HLA-DRB1*08:01L
ADFDTWFSQRGGSY

SEQ ID NO: 22497 - protein, 14 aa, Severe acute respiratory syndrome coronavirus 2
  REGION 1..14: note = Table B: HLA-DRB1*08:01L HLA-DRB1*13:01L HLA-DRB1*09:01L HLA-DRB1*08:02L
RYVLMDGSIIQFPN

SEQ ID NO: 22498 - protein, 14 aa, Severe acute respiratory syndrome coronavirus 2
  REGION 1..14: note = Table B: HLA-DRB1*08:01L HLA-DRB3*01:01L HLA-DRB1*15:01L
VRVVTTFDSEYCRH

SEQ ID NO: 22499 - protein, 13 aa, Severe acute respiratory syndrome coronavirus 2
  REGION 1..13: note = Table B: HLA-DRB1*08:01L
YFMRFRRAFGEYS

SEQ ID NO: 22500 - protein, 12 aa, Severe acute respiratory syndrome coronavirus 2
  REGION 1..12: note = Table B: HLA-DRB1*08:01L
SNYLKRRVVFNG

SEQ ID NO: 22501 - protein, 13 aa, Severe acute respiratory syndrome coronavirus 2
  REGION 1..13: note = Table B: HLA-DRB1*08:01L HLA-DPA1*01:03-B1*02:01L HLA-DPA1*01:03-B1*104:01L
VVFNGVSFSTFEE

SEQ ID NO: 22502 - protein, 13 aa, Severe acute respiratory syndrome coronavirus 2
  REGION 1..13: note = Table B: HLA-DRB1*08:01L
NKEMYLKLRSDVL

SEQ ID NO: 22503 - protein, 14 aa, Severe acute respiratory syndrome coronavirus 2
  REGION 1..14: note = Table B: HLA-DRB1*08:01L
PLTQYNRYLALYNK

SEQ ID NO: 22504 - protein, 12 aa, Severe acute respiratory syndrome coronavirus 2
  REGION 1..12: note = Table B: HLA-DRB1*08:01L HLA-DRB1*04:08L
QSGFRKMAFPSG

SEQ ID NO: 22505 - protein, 14 aa, Severe acute respiratory syndrome coronavirus 2
  REGION 1..14: note = Table B: HLA-DRB1*08:01L HLA-DRB1*12:01L HLA-DPA1*01:02-B1*04:01L HLA-DRB1*15:03L
LRVIGHSMQNCVLK

SEQ ID NO: 22506 - protein, 11 aa, Severe acute respiratory syndrome coronavirus 2
  REGION 1..11: note = Table B: HLA-DRB1*08:01L HLA-DQA1*01-B1*05L HLA-DQA1*03:01-B1*03:02L
RPNFTIKGSFL

SEQ ID NO: 22507 - protein, 14 aa, Severe acute respiratory syndrome coronavirus 2
  REGION 1..14: note = Table B: HLA-DRB1*08:01L HLA-DPA1*03:01-B1*105:01L
VSFCYMHHMELPTG

SEQ ID NO: 22508 - protein, 13 aa, Severe acute respiratory syndrome coronavirus 2
  REGION 1..13: note = Table B: HLA-DRB1*08:01L HLA-DPA1*01:03-B1*04:02L
VDRQTAQAAGTDT

SEQ ID NO: 22509 - protein, 12 aa, Severe acute respiratory syndrome coronavirus 2
  REGION 1..12: note = Table B: HLA-DRB1*08:01L HLA-DRB1*12:01L
DRWFLNRFTTTL

SEQ ID NO: 22510 - protein, 11 aa, Severe acute respiratory syndrome coronavirus 2
  REGION 1..11: note = Table B: HLA-DRB1*08:01L
KYNYEPLTQDH

SEQ ID NO: 22511 - protein, 11 aa, Severe acute respiratory syndrome coronavirus 2
  REGION 1..11: note = Table B: HLA-DRB1*08:01L
TFQSAVKRTIK

SEQ ID NO: 22512 - protein, 13 aa, Severe acute respiratory syndrome coronavirus 2
  REGION 1..13: note = Table B: HLA-DRB1*08:01L
FRYMNSQGLLPPK

SEQ ID NO: 22513 - protein, 15 aa, Severe acute respiratory syndrome coronavirus 2
  REGION 1..15: note = Table B: HLA-DRB1*08:01L HLA-DQA1*05:05-B1*03:19L
VQLHNDILLAKDTTE

SEQ ID NO: 22514 - protein, 12 aa, Severe acute respiratory syndrome coronavirus 2
  REGION 1..12: note = Table B: HLA-DRB1*08:01L
GDSEVVLKKLKK

SEQ ID NO: 22515 - protein, 12 aa, Severe acute respiratory syndrome coronavirus 2
  REGION 1..12: note = Table B: HLA-DRB1*08:01L
VLKKLKKSLNVA

SEQ ID NO: 22516 - protein, 13 aa, Severe acute respiratory syndrome coronavirus 2
  REGION 1..13: note = Table B: HLA-DRB1*08:01L
AAMQRKLEKMADQ

SEQ ID NO: 22517 - protein, 14 aa, Severe acute respiratory syndrome coronavirus 2
  REGION 1..14: note = Table B: HLA-DRB1*08:01L HLA-DRB1*04:08L
RSEDKRAKVTSAMQ

SEQ ID NO: 22518 - protein, 10 aa, Severe acute respiratory syndrome coronavirus 2
  REGION 1..10: note = Table B: HLA-DRB1*08:01L
FTMLRKLDND

SEQ ID NO: 22519 - protein, 14 aa, Severe acute respiratory syndrome coronavirus 2
  REGION 1..14: note = Table B: HLA-DRB1*08:01L HLA-DRB4*01:01L HLA-DPA1*01:03-B1*104:01L HLA-DRB1*10:01L HLA-DRB1*08:03L
ADSKIVQLSEISMD

SEQ ID NO: 22520 - protein, 14 aa, Severe acute respiratory syndrome coronavirus 2
  REGION 1..14: note = Table B: HLA-DRB1*08:01L HLA-DRB5*01:01L HLA-DRB4*02:01NL HLA-DPA1*01:03-B1*04:02L HLA-DPA1*01:03-B1*02:01L HLA-DRB1*08:02L
VTALRANSAVKLQN

SEQ ID NO: 22521 - protein, 12 aa, Severe acute respiratory syndrome coronavirus 2
  REGION 1..12: note = Table B: HLA-DRB1*08:01L HLA-DRB1*04:08L
KWARFPKSDGTG

SEQ ID NO: 22522 - protein, 11 aa, Severe acute respiratory syndrome coronavirus 2
  REGION 1..11: note = Table B: HLA-DRB1*08:01L HLA-DRB1*12:01L HLA-DRB1*14:17L
VTDTPKGPKVK

SEQ ID NO: 22523 - protein, 13 aa, Severe acute respiratory syndrome coronavirus 2
  REGION 1..13: note = Table B: HLA-DRB1*08:01L HLA-DRB1*11:01L
AYKDYLASGGQPI

SEQ ID NO: 22524 - protein, 14 aa, Severe acute respiratory syndrome coronavirus 2
  REGION 1..14: note = Table B: HLA-DRB1*08:01L HLA-DPA1*01:03-B1*04:02L
TGTGQAITVTPEAN

SEQ ID NO: 22525 - protein, 13 aa, Severe acute respiratory syndrome coronavirus 2
  REGION 1..13: note = Table B: HLA-DRB1*08:01L
NDKVAGFAKFLKT

SEQ ID NO: 22526 - protein, 15 aa, Severe acute respiratory syndrome coronavirus 2
  REGION 1..15: note = Table B: HLA-DRB1*08:01L
LKTNCCRFQEKDEDD

SEQ ID NO: 22527 - protein, 13 aa, Severe acute respiratory syndrome coronavirus 2
  REGION 1..13: note = Table B: HLA-DRB1*08:01L
NCCRFQEKDEDDN

SEQ ID NO: 22528 - protein, 11 aa, Severe acute respiratory syndrome coronavirus 2
  REGION 1..11: note = Table B: HLA-DRB1*08:01L
SYFVVKRHTFS

SEQ ID NO: 22529 - protein, 11 aa, Severe acute respiratory syndrome coronavirus 2
  REGION 1..11: note = Table B: HLA-DRB1*08:01L
YFVVKRHTFSN

SEQ ID NO: 22530 - protein, 14 aa, Severe acute respiratory syndrome coronavirus 2
  REGION 1..14: note = Table B: HLA-DRB1*08:01L HLA-DPA1*02:01-B1*13:01L
LKDCPAVAKHDFFK

SEQ ID NO: 22531 - protein, 14 aa, Severe acute respiratory syndrome coronavirus 2
  REGION 1..14: note = Table B: HLA-DRB1*08:01L HLA-DPA1*02:01-B1*13:01L
AKHDFFKFRIDGDM

SEQ ID NO: 22532 - protein, 11 aa, Severe acute respiratory syndrome coronavirus 2
  REGION 1..11: note = Table B: HLA-DRB1*08:01L
DLVYALRHFDE

SEQ ID NO: 22533 - protein, 11 aa, Severe acute respiratory syndrome coronavirus 2
  REGION 1..11: note = Table B: HLA-DRB1*08:01L
LVYALRHFDEG

SEQ ID NO: 22534 - protein, 15 aa, Severe acute respiratory syndrome coronavirus 2
  REGION 1..15: note = Table B: HLA-DRB1*08:01L
AGIVGVLTLDNQDLN

SEQ ID NO: 22535 - protein, 14 aa, Severe acute respiratory syndrome coronavirus 2
  REGION 1..14: note = Table B: HLA-DRB1*08:01L
IVGVLTLDNQDLNG

SEQ ID NO: 22536 - protein, 14 aa, Severe acute respiratory syndrome coronavirus 2
  REGION 1..14: note = Table B: HLA-DRB1*08:01L HLA-DRB1*11:01L
TTPGSGVPVVDSYY

SEQ ID NO: 22537 - protein, 12 aa, Severe acute respiratory syndrome coronavirus 2
  REGION 1..12: note = Table B: HLA-DRB1*08:01L HLA-DQA1*01-B1*05L HLA-DPA1*03:01-B1*105:01L HLA-DPA1*01:02-B1*04:01L HLA-DRB1*16:01L
WDLLKYDFTEER

SEQ ID NO: 22538 - protein, 13 aa, Severe acute respiratory syndrome coronavirus 2
  REGION 1..13: note = Table B: HLA-DRB1*08:01L HLA-DRB1*04:08L
YDFTEERLKLFDR

SEQ ID NO: 22539 - protein, 12 aa, Severe acute respiratory syndrome coronavirus 2
  REGION 1..12: note = Table B: HLA-DRB1*08:01L
EERLKLFDRYFK

SEQ ID NO: 22540 - protein, 12 aa, Severe acute respiratory syndrome coronavirus 2
  REGION 1..12: note = Table B: HLA-DRB1*08:01L
KLFDRYFKYWDQ

SEQ ID NO: 22541 - protein, 13 aa, Severe acute respiratory syndrome coronavirus 2
  REGION 1..13: note = Table B: HLA-DRB1*08:01L
KYWDQTYHPNCVN

SEQ ID NO: 22542 - protein, 11 aa, Severe acute respiratory syndrome coronavirus 2
  REGION 1..11: note = Table B: HLA-DRB1*08:01L HLA-DRB1*16:01L HLA-DRB1*04:08L
GYHFRELGVVH

SEQ ID NO: 22543 - protein, 13 aa, Severe acute respiratory syndrome coronavirus 2
  REGION 1..13: note = Table B: HLA-DRB1*08:01L
VVHNQDVNLHSSR

SEQ ID NO: 22544 - protein, 14 aa, Severe acute respiratory syndrome coronavirus 2
  REGION 1..14: note = Table B: HLA-DRB1*08:01L HLA-DPA1*02:01-B1*13:01L
VELKHFFFAQDGNA

SEQ ID NO: 22545 - protein, 14 aa, Severe acute respiratory syndrome coronavirus 2
  REGION 1..14: note = Table B: HLA-DRB1*08:01L HLA-DRB1*13:01L HLA-DRB1*07:01L
FFAQDGNAAISDYD

SEQ ID NO: 22546 - protein, 13 aa, Severe acute respiratory syndrome coronavirus 2
  REGION 1..13: note = Table B: HLA-DRB1*08:01L HLA-DRB1*11:01L HLA-DPA1*01:03-B1*04:02L HLA-DRB3*01:01L HLA-DPA1*02:01-B1*13:01L HLA-DQA1*01:03-B1*06:01L
IVNNLDKSAGFPF

SEQ ID NO: 22547 - protein, 14 aa, Severe acute respiratory syndrome coronavirus 2
  REGION 1..14: note = Table B: HLA-DRB1*08:01L
NLDKSAGFPFNKWG

SEQ ID NO: 22548 - protein, 14 aa, Severe acute respiratory syndrome coronavirus 2
  REGION 1..14: note = Table B: HLA-DRB1*08:01L
NKWGKARLYYDSMS

SEQ ID NO: 22549 - protein, 16 aa, Severe acute respiratory syndrome coronavirus 2
  REGION 1..16: note = Table B: HLA-DRB1*08:01L HLA-DRB1*09:01L HLA-DRB1*07:01L HLA-DRB1*08:02L HLA-DRB1*08:03L
DSMSYEDQDALFAYTK

SEQ ID NO: 22550 - protein, 14 aa, Severe acute respiratory syndrome coronavirus 2
  REGION 1..14: note = Table B: HLA-DRB1*08:01L HLA-DRB1*12:01L HLA-DRB1*16:01L HLA-DRB1*15:03L
DQDALFAYTKRNVI

SEQ ID NO: 22551 - protein, 13 aa, Severe acute respiratory syndrome coronavirus 2
  REGION 1..13: note = Table B: HLA-DRB1*08:01L
ITQMNLKYAISAK

SEQ ID NO: 22552 - protein, 13 aa, Severe acute respiratory syndrome coronavirus 2
  REGION 1..13: note = Table B: HLA-DRB1*08:01L
RQFHQKLLKSIAA

SEQ ID NO: 22553 - protein, 13 aa, Severe acute respiratory syndrome coronavirus 2
  REGION 1..13: note = Table B: HLA-DRB1*08:01L
ATVVIGTSKFYGG

SEQ ID NO: 22554 - protein, 15 aa, Severe acute respiratory syndrome coronavirus 2
  REGION 1..15: note = Table B: HLA-DRB1*08:01L HLA-DRB1*15:03L
VRNLQHRLYECLYRN

SEQ ID NO: 22555 - protein, 11 aa, Severe acute respiratory syndrome coronavirus 2
  REGION 1..11: note = Table B: HLA-DRB1*08:01L
RLYECLYRNRD

SEQ ID NO: 22556 - protein, 11 aa, Severe acute respiratory syndrome coronavirus 2
  REGION 1..11: note = Table B: HLA-DRB1*08:01L
YECLYRNRDVD

SEQ ID NO: 22557 - protein, 14 aa, Severe acute respiratory syndrome coronavirus 2
  REGION 1..14: note = Table B: HLA-DRB1*08:01L
ECLYRNRDVDTDFV

SEQ ID NO: 22558 - protein, 10 aa, Severe acute respiratory syndrome coronavirus 2
  REGION 1..10: note = Table B: HLA-DRB1*08:01L HLA-DPA1*01:02-B1*04:01L
FYAYLRKHFS

SEQ ID NO: 22559 - protein, 11 aa, Severe acute respiratory syndrome coronavirus 2
  REGION 1..11: note = Table B: HLA-DRB1*08:01L
MSYYCKSHKPP

SEQ ID NO: 22560 - protein, 12 aa, Severe acute respiratory syndrome coronavirus 2
  REGION 1..12: note = Table B: HLA-DRB1*08:01L HLA-DRB1*12:01L HLA-DRB1*04:08L HLA-DRB1*15:03L
HLSWEVGKPRPP

SEQ ID NO: 22561 - protein, 13 aa, Severe acute respiratory syndrome coronavirus 2
  REGION 1..13: note = Table B: HLA-DRB1*08:01L HLA-DPA1*03:01-B1*105:01L
LSWEVGKPRPPLN

SEQ ID NO: 22562 - protein, 14 aa, Severe acute respiratory syndrome coronavirus 2
  REGION 1..14: note = Table B: HLA-DRB1*08:01L
AQCFKMFYKGVITH

SEQ ID NO: 22563 - protein, 13 aa, Severe acute respiratory syndrome coronavirus 2
  REGION 1..13: note = Table B: HLA-DRB1*08:01L HLA-DRB1*12:01L HLA-DRB1*04:08L
DRDLYDKLQFTSL

SEQ ID NO: 22564 - protein, 14 aa, Severe acute respiratory syndrome coronavirus 2
  REGION 1..14: note = Table B: HLA-DRB1*08:01L HLA-DRB3*01:01L HLA-DRB1*07:01L
KVITGLHPTQAPTH

SEQ ID NO: 22565 - protein, 12 aa, Severe acute respiratory syndrome coronavirus 2
  REGION 1..12: note = Table B: HLA-DRB1*08:01L
SRVSAKPPPGDQ

SEQ ID NO: 22566 - protein, 14 aa, Severe acute respiratory syndrome coronavirus 2
  REGION 1..14: note = Table B: HLA-DRB1*08:01L HLA-DPA1*01:03-B1*04:02L
KHLIPLMYKGLPWN

SEQ ID NO: 22567 - protein, 13 aa, Severe acute respiratory syndrome coronavirus 2
  REGION 1..13: note = Table B: HLA-DRB1*08:01L
RIKIVQMLSDTLK

SEQ ID NO: 22568 - protein, 13 aa, Severe acute respiratory syndrome coronavirus 2
  REGION 1..13: note = Table B: HLA-DRB1*08:01L HLA-DQA1*05:05-B1*03:01L
VLWAHGFELTSMK

SEQ ID NO: 22569 - protein, 11 aa, Severe acute respiratory syndrome coronavirus 2
  REGION 1..11: note = Table B: HLA-DRB1*08:01L
KINAACRKVQH

SEQ ID NO: 22570 - protein, 16 aa, Severe acute respiratory syndrome coronavirus 2
  REGION 1..16: note = Table B: HLA-DRB1*08:01L HLA-DRB1*04:08L
VDRYPANSIVCRFDTR

SEQ ID NO: 22571 - protein, 14 aa, Severe acute respiratory syndrome coronavirus 2
  REGION 1..14: note = Table B: HLA-DRB1*08:01L
RFDTRVLSNLNLPG

SEQ ID NO: 22572 - protein, 14 aa, Severe acute respiratory syndrome coronavirus 2
  REGION 1..14: note = Table B: HLA-DRB1*08:01L HLA-DQA1*05:05-B1*03:01L
FYYSDSPCESHGKQ

SEQ ID NO: 22573 - protein, 13 aa, Severe acute respiratory syndrome coronavirus 2
  REGION 1..13: note = Table B: HLA-DRB1*08:01L HLA-DRB1*16:01L HLA-DRB1*04:08L
FELWAKRNIKPVP

SEQ ID NO: 22574 - protein, 15 aa, Severe acute respiratory syndrome coronavirus 2
  REGION 1..15: note = Table B: HLA-DRB1*08:01L
IGVCSMTDIAKKPTE

SEQ ID NO: 22575 - protein, 14 aa, Severe acute respiratory syndrome coronavirus 2
  REGION 1..14: note = Table B: HLA-DRB1*08:01L
IGEAVKTQFNYYKK

SEQ ID NO: 22576 - protein, 14 aa, Severe acute respiratory syndrome coronavirus 2
  REGION 1..14: note = Table B: HLA-DRB1*08:01L
EAVKTQFNYYKKVD

SEQ ID NO: 22577 - protein, 10 aa, Severe acute respiratory syndrome coronavirus 2
  REGION 1..10: note = Table B: HLA-DRB1*08:01L
QFNYYKKVDG

SEQ ID NO: 22578 - protein, 12 aa, Severe acute respiratory syndrome coronavirus 2
  REGION 1..12: note = Table B: HLA-DRB1*08:01L HLA-DQA1*03:01-B1*03:02L
QEFKPRSQMEID

SEQ ID NO: 22579 - protein, 10 aa, Severe acute respiratory syndrome coronavirus 2
  REGION 1..10: note = Table B: HLA-DRB1*08:01L
EFIERYKLEG

SEQ ID NO: 22580 - protein, 12 aa, Severe acute respiratory syndrome coronavirus 2
  REGION 1..12: note = Table B: HLA-DRB1*08:01L HLA-DRB1*04:08L
ERYKLEGYAFEH

SEQ ID NO: 22581 - protein, 13 aa, Severe acute respiratory syndrome coronavirus 2
  REGION 1..13: note = Table B: HLA-DRB1*08:01L HLA-DRB1*16:01L
LHLLIGLAKRFKE

SEQ ID NO: 22582 - protein, 13 aa, Severe acute respiratory syndrome coronavirus 2
  REGION 1..13: note = Table B: HLA-DRB1*08:01L
KVVKVTIDYTEIS

SEQ ID NO: 22583 - protein, 15 aa, Severe acute respiratory syndrome coronavirus 2
  REGION 1..15: note = Table B: HLA-DRB1*08:01L HLA-DPA1*01:03-B1*04:02L HLA-DPA1*01:03-B1*104:01L
YPKLQSSQAWQPGVA

SEQ ID NO: 22584 - protein, 15 aa, Severe acute respiratory syndrome coronavirus 2
  REGION 1..15: note = Table B: HLA-DRB1*08:01L
STLIGDCATVHTANK

SEQ ID NO: 22585 - protein, 13 aa, Severe acute respiratory syndrome coronavirus 2
  REGION 1..13: note = Table B: HLA-DRB1*08:01L HLA-DPA1*01:03-B1*02:01L
EHSWNADLYKLMG

SEQ ID NO: 22586 - protein, 13 aa, Severe acute respiratory syndrome coronavirus 2
  REGION 1..13: note = Table B: HLA-DRB1*08:01L
AFLIGCNYLGKPR

SEQ ID NO: 22587 - protein, 13 aa, Severe acute respiratory syndrome coronavirus 2
  REGION 1..13: note = Table B: HLA-DRB1*08:01L
LIGCNYLGKPREQ

SEQ ID NO: 22588 - protein, 14 aa, Severe acute respiratory syndrome coronavirus 2
  REGION 1..14: note = Table B: HLA-DRB1*08:01L
IGCNYLGKPREQID

SEQ ID NO: 22589 - protein, 10 aa, Severe acute respiratory syndrome coronavirus 2
  REGION 1..10: note = Table B: HLA-DRB1*08:01L HLA-DQA1*03:01-B1*03:02L
DMSKFPLKLR

SEQ ID NO: 22590 - protein, 11 aa, Severe acute respiratory syndrome coronavirus 2
  REGION 1..11: note = Table B: HLA-DRB1*08:01L HLA-DRB3*01:01L
SLLSKGRLIIR

SEQ ID NO: 22591 - protein, 12 aa, Severe acute respiratory syndrome coronavirus 2
  REGION 1..12: note = Table B: HLA-DRB1*08:01L HLA-DRB3*01:01L
RVVISSDVLVNN

SEQ ID NO: 22592 - protein, 13 aa, Severe acute respiratory syndrome coronavirus 2
  REGION 1..13: note = Table B: HLA-DRB1*08:01L
KRFDNPVLPFNDG

SEQ ID NO: 22593 - protein, 15 aa, Severe acute respiratory syndrome coronavirus 2
  REGION 1..15: note = Table B: HLA-DRB1*08:01L
EFQFCNDPFLGVYYH

SEQ ID NO: 22594 - protein, 12 aa, Severe acute respiratory syndrome coronavirus 2
  REGION 1..12: note = Table B: HLA-DRB1*08:01L HLA-DRB1*04:08L
VYYHKNNKSWME

SEQ ID NO: 22595 - protein, 12 aa, Severe acute respiratory syndrome coronavirus 2
  REGION 1..12: note = Table B: HLA-DRB1*08:01L HLA-DRB1*12:01L HLA-DRB1*04:08L
KSWMESEFRVYS

SEQ ID NO: 22596 - protein, 13 aa, Severe acute respiratory syndrome coronavirus 2
  REGION 1..13: note = Table B: HLA-DRB1*08:01L HLA-DQA1*03:01-B1*03:02L HLA-DPA1*01:02-B1*04:01L HLA-DRB1*16:01L HLA-DQA1*01:03-B1*06:01L
LQPRTFLLKYNEN

SEQ ID NO: 22597 - protein, 12 aa, Severe acute respiratory syndrome coronavirus 2
  REGION 1..12: note = Table B: HLA-DRB1*08:01L
PRTFLLKYNENG

SEQ ID NO: 22598 - protein, 14 aa, Severe acute respiratory syndrome coronavirus 2
  REGION 1..14: note = Table B: HLA-DRB1*08:01L
ETKCTLKSFTVEKG

SEQ ID NO: 22599 - protein, 11 aa, Severe acute respiratory syndrome coronavirus 2
  REGION 1..11: note = Table B: HLA-DRB1*08:01L
GNYNYLYRLFR

SEQ ID NO: 22600 - protein, 12 aa, Severe acute respiratory syndrome coronavirus 2
  REGION 1..12: note = Table B: HLA-DRB1*08:01L
YLYRLFRKSNLK

SEQ ID NO: 22601 - protein, 12 aa, Severe acute respiratory syndrome coronavirus 2
  REGION 1..12: note = Table B: HLA-DRB1*08:01L
LFRKSNLKPFER

SEQ ID NO: 22602 - protein, 13 aa, Severe acute respiratory syndrome coronavirus 2
  REGION 1..13: note = Table B: HLA-DRB1*08:01L
RKSNLKPFERDIS

SEQ ID NO: 22603 - protein, 12 aa, Severe acute respiratory syndrome coronavirus 2
  REGION 1..12: note = Table B: HLA-DRB1*08:01L HLA-DRB4*02:01NL HLA-DRB1*16:01L HLA-DRB1*04:08L
TGTGVLTESNKK

SEQ ID NO: 22604 - protein, 11 aa, Severe acute respiratory syndrome coronavirus 2
  REGION 1..11: note = Table B: HLA-DRB1*08:01L
QTQTNSPRRAR

SEQ ID NO: 22605 - protein, 14 aa, Severe acute respiratory syndrome coronavirus 2
  REGION 1..14: note = Table B: HLA-DRB1*08:01L
TGIAVEQDKNTQEV

SEQ ID NO: 22606 - protein, 13 aa, Severe acute respiratory syndrome coronavirus 2
  REGION 1..13: note = Table B: HLA-DRB1*08:01L
KQIYKTPPIKDFG

SEQ ID NO: 22607 - protein, 14 aa, Severe acute respiratory syndrome coronavirus 2
  REGION 1..14: note = Table B: HLA-DRB1*08:01L HLA-DPA1*01:03-B1*02:01L
KVTLADAGFIKQYG

SEQ ID NO: 22608 - protein, 14 aa, Severe acute respiratory syndrome coronavirus 2
  REGION 1..14: note = Table B: HLA-DRB1*08:01L
WTFGAGAALQIPFA

SEQ ID NO: 22609 - protein, 13 aa, Severe acute respiratory syndrome coronavirus 2
  REGION 1..13: note = Table B: HLA-DRB1*08:01L HLA-DRB1*16:01L HLA-DRB1*15:03L
VLNDILSRLDKVE

SEQ ID NO: 22610 - protein, 12 aa, Severe acute respiratory syndrome coronavirus 2
  REGION 1..12: note = Table B: HLA-DRB1*08:01L
SKRVDFCGKGYH

SEQ ID NO: 22611 - protein, 12 aa, Severe acute respiratory syndrome coronavirus 2
  REGION 1..12: note = Table B: HLA-DRB1*08:01L
HWFVTQRNFYEP

SEQ ID NO: 22612 - protein, 11 aa, Severe acute respiratory syndrome coronavirus 2
  REGION 1..11: note = Table B: HLA-DRB1*08:01L
KEIDRLNEVAK

SEQ ID NO: 22613 - protein, 11 aa, Severe acute respiratory syndrome coronavirus 2
  REGION 1..11: note = Table B: HLA-DRB1*08:01L
RWQLALSKGVH

SEQ ID NO: 22614 - protein, 12 aa, Severe acute respiratory syndrome coronavirus 2
  REGION 1..12: note = Table B: HLA-DRB1*08:01L HLA-DPA1*01:03-B1*04:01L HLA-DRB1*07:01L
NKIVDEPEEHVQ

SEQ ID NO: 22615 - protein, 13 aa, Severe acute respiratory syndrome coronavirus 2
  REGION 1..13: note = Table B: HLA-DRB1*08:01L HLA-DRB1*04:08L
VSLVKPSFYVYSR

SEQ ID NO: 22616 - protein, 13 aa, Severe acute respiratory syndrome coronavirus 2
  REGION 1..13: note = Table B: HLA-DRB1*08:01L
RVKNLNSSRVPDL

SEQ ID NO: 22617 - protein, 11 aa, Severe acute respiratory syndrome coronavirus 2
  REGION 1..11: note = Table B: HLA-DRB1*08:01L
ASFRLFARTRS

SEQ ID NO: 22618 - protein, 11 aa, Severe acute respiratory syndrome coronavirus 2
  REGION 1..11: note = Table B: HLA-DRB1*08:01L
SFRLFARTRSM

SEQ ID NO: 22619 - protein, 14 aa, Severe acute respiratory syndrome coronavirus 2
  REGION 1..14: note = Table B: HLA-DRB1*08:01L
LGRCDIKDLPKEIT

SEQ ID NO: 22620 - protein, 16 aa, Severe acute respiratory syndrome coronavirus 2
  REGION 1..16: note = Table B: HLA-DRB1*08:01L HLA-DPA1*03:01-B1*105:01L HLA-DRB1*15:03L
DIKDLPKEITVATSRT

SEQ ID NO: 22621 - protein, 11 aa, Severe acute respiratory syndrome coronavirus 2
  REGION 1..11: note = Table B: HLA-DRB1*08:01L HLA-DQA1*05:05-B1*03:01L
DSGFAAYSRYR

SEQ ID NO: 22622 - protein, 13 aa, Severe acute respiratory syndrome coronavirus 2
  REGION 1..13: note = Table B: HLA-DRB1*08:01L HLA-DRB1*16:01L HLA-DRB1*04:08L
SRYRIGNYKLNTD

SEQ ID NO: 22623 - protein, 12 aa, Severe acute respiratory syndrome coronavirus 2
  REGION 1..12: note = Table B: HLA-DRB1*08:01L
YHYQECVRGTTV

SEQ ID NO: 22624 - protein, 13 aa, Severe acute respiratory syndrome coronavirus 2
  REGION 1..13: note = Table B: HLA-DRB1*08:01L HLA-DRB1*11:01L HLA-DPA1*01:03-B1*04:01L HLA-DRB1*09:01L HLA-DPA1*01:03-B1*04:02L HLA-DPA1*02:01-B1*13:01L HLA-DRB1*07:01L HLA-DRB1*08:03L
SGTYEGNSPFHPL

SEQ ID NO: 22625 - protein, 15 aa, Severe acute respiratory syndrome coronavirus 2
  REGION 1..15: note = Table B: HLA-DRB1*08:01L
TYEGNSPFHPLADNK

SEQ ID NO: 22626 - protein, 12 aa, Severe acute respiratory syndrome coronavirus 2
  REGION 1..12: note = Table B: HLA-DRB1*08:01L
YSKWYIRVGARK

SEQ ID NO: 22627 - protein, 10 aa, Severe acute respiratory syndrome coronavirus 2
  REGION 1..10: note = Table B: HLA-DRB1*08:01L HLA-DQA1*03:01-B1*03:02L HLA-DRB1*16:01L HLA-DQA1*02:01-B1*03:03L
ARKSAPLIEL

SEQ ID NO: 22628 - protein, 11 aa, Severe acute respiratory syndrome coronavirus 2
  REGION 1..11: note = Table B: HLA-DRB1*08:01L HLA-DRB1*10:01L
WFTALTQHGKE

SEQ ID NO: 22629 - protein, 13 aa, Severe acute respiratory syndrome coronavirus 2
  REGION 1..13: note = Table B: HLA-DRB1*08:01L
NQLESKMSGKGQQ

SEQ ID NO: 22630 - protein, 14 aa, Severe acute respiratory syndrome coronavirus 2
  REGION 1..14: note = Table B: HLA-DRB1*08:01L
SKMSGKGQQQQGQT

SEQ ID NO: 22631 - protein, 10 aa, Severe acute respiratory syndrome coronavirus 2
  REGION 1..10: note = Table B: HLA-DRB1*08:01L HLA-DQA1*03:01-B1*03:02L
AEASKKPRQK

SEQ ID NO: 22632 - protein, 15 aa, Severe acute respiratory syndrome coronavirus 2
  REGION 1..15: note = Table B: HLA-DRB1*08:01L HLA-DRB4*01:01L HLA-DRB1*12:02L
SKQLQQSMSSADSTQ

SEQ ID NO: 22633 - protein, 14 aa, Severe acute respiratory syndrome coronavirus 2
  REGION 1..14: note = Table B: HLA-DRB1*11:01L HLA-DPA1*02:01-B1*13:01L
SLPVLQVRDVLVRG

SEQ ID NO: 22634 - protein, 14 aa, Severe acute respiratory syndrome coronavirus 2
  REGION 1..14: note = Table B: HLA-DRB1*11:01L
QENWNTKHSSGVTR

SEQ ID NO: 22635 - protein, 15 aa, Severe acute respiratory syndrome coronavirus 2
  REGION 1..15: note = Table B: HLA-DRB1*11:01L HLA-DQA1*03:01-B1*03:02L
DTKRGVYCCREHEHE

SEQ ID NO: 22636 - protein, 15 aa, Severe acute respiratory syndrome coronavirus 2
  REGION 1..15: note = Table B: HLA-DRB1*11:01L HLA-DRB1*15:03L
WVPRASANIGCNHTG

SEQ ID NO: 22637 - protein, 14 aa, Severe acute respiratory syndrome coronavirus 2
  REGION 1..14: note = Table B: HLA-DRB1*11:01L HLA-DRB3*01:01L HLA-DQA1*03:01-B1*03:02L HLA-DPA1*01:02-B1*04:01L HLA-DRB1*07:01L
ASANIGCNHTGVVG

SEQ ID NO: 22638 - protein, 14 aa, Severe acute respiratory syndrome coronavirus 2
  REGION 1..14: note = Table B: HLA-DRB1*11:01L
FSASTSAFVETVKG

SEQ ID NO: 22639 - protein, 13 aa, Severe acute respiratory syndrome coronavirus 2
  REGION 1..13: note = Table B: HLA-DRB1*11:01L
GTVYEKLKPVLDW

SEQ ID NO: 22640 - protein, 16 aa, Severe acute respiratory syndrome coronavirus 2
  REGION 1..16: note = Table B: HLA-DRB1*11:01L HLA-DPA1*01:03-B1*04:02L HLA-DRB1*07:01L
LKALNLGETFVTHSKG

SEQ ID NO: 22641 - protein, 13 aa, Severe acute respiratory syndrome coronavirus 2
  REGION 1..13: note = Table B: HLA-DRB1*11:01L HLA-DRB1*04:08L
LYRKCVKSREETG

SEQ ID NO: 22642 - protein, 16 aa, Severe acute respiratory syndrome coronavirus 2
  REGION 1..16: note = Table B: HLA-DRB1*11:01L
TQYEYGTEDDYQGKPL

SEQ ID NO: 22643 - protein, 14 aa, Severe acute respiratory syndrome coronavirus 2
  REGION 1..14: note = Table B: HLA-DRB1*11:01L HLA-DRB1*08:03L
GTEDDYQGKPLEFG

SEQ ID NO: 22644 - protein, 14 aa, Severe acute respiratory syndrome coronavirus 2
  REGION 1..14: note = Table B: HLA-DRB1*11:01L HLA-DRB1*04:10L HLA-DPA1*01:03-B1*104:01L
GGGVAGALNKATNN

SEQ ID NO: 22645 - protein, 13 aa, Severe acute respiratory syndrome coronavirus 2
  REGION 1..13: note = Table B: HLA-DRB1*11:01L
SAFYILPSIISNE

SEQ ID NO: 22646 - protein, 14 aa, Severe acute respiratory syndrome coronavirus 2
  REGION 1..14: note = Table B: HLA-DRB1*11:01L HLA-DRB1*07:01L
NLREMLAHAEETRK

SEQ ID NO: 22647 - protein, 14 aa, Severe acute respiratory syndrome coronavirus 2
  REGION 1..14: note = Table B: HLA-DRB1*11:01L
QRKYKGIKIQEGVV

SEQ ID NO: 22648 - protein, 17 aa, Severe acute respiratory syndrome coronavirus 2
  REGION 1..17: note = Table B: HLA-DRB1*11:01L
MPLGYVTHGLNLEEAAR

SEQ ID NO: 22649 - protein, 14 aa, Severe acute respiratory syndrome coronavirus 2
  REGION 1..14: note = Table B: HLA-DRB1*11:01L HLA-DRB3*01:01L
KVFTTVDNINLHTQ

SEQ ID NO: 22650 - protein, 15 aa, Severe acute respiratory syndrome coronavirus 2
  REGION 1..15: note = Table B: HLA-DRB1*11:01L HLA-DPA1*01:03-B1*104:01L
LRVEAFEYYHTTDPS

SEQ ID NO: 22651 - protein, 13 aa, Severe acute respiratory syndrome coronavirus 2
  REGION 1..13: note = Table B: HLA-DRB1*11:01L HLA-DRB3*01:01L HLA-DPA1*01:03-B1*02:01L
YLFQHANLDSCKR

SEQ ID NO: 22652 - protein, 15 aa, Severe acute respiratory syndrome coronavirus 2
  REGION 1..15: note = Table B: HLA-DRB1*11:01L HLA-DPA1*02:01-B1*13:01L
SKETLYCIDGALLTK

SEQ ID NO: 22653 - protein, 14 aa, Severe acute respiratory syndrome coronavirus 2
  REGION 1..14: note = Table B: HLA-DRB1*11:01L HLA-DRB3*01:01L HLA-DPA1*01:03-B1*104:01L
VDNSSLTIKKPNEL

SEQ ID NO: 22654 - protein, 12 aa, Severe acute respiratory syndrome coronavirus 2
  REGION 1..12: note = Table B: HLA-DRB1*11:01L HLA-DRB1*04:10L HLA-DRB1*08:03L
FISAARQGFVDS

SEQ ID NO: 22655 - protein, 15 aa, Severe acute respiratory syndrome coronavirus 2
  REGION 1..15: note = Table B: HLA-DRB1*11:01L
IALIWNVKDFMSLSE

SEQ ID NO: 22656 - protein, 15 aa, Severe acute respiratory syndrome coronavirus 2
  REGION 1..15: note = Table B: HLA-DRB1*11:01L HLA-DRB3*01:01L
RQVVNVVTTKIALKG

SEQ ID NO: 22657 - protein, 12 aa, Severe acute respiratory syndrome coronavirus 2
  REGION 1..12: note = Table B: HLA-DRB1*11:01L HLA-DRB1*10:01L HLA-DRB1*15:03L
IGYKAIDGGVTR

SEQ ID NO: 22658 - protein, 14 aa, Severe acute respiratory syndrome coronavirus 2
  REGION 1..14: note = Table B: HLA-DRB1*11:01L
YFMRFRRAFGEYSH

SEQ ID NO: 22659 - protein, 15 aa, Severe acute respiratory syndrome coronavirus 2
  REGION 1..15: note = Table B: HLA-DRB1*11:01L
TFLLNKEMYLKLRSD

SEQ ID NO: 22660 - protein, 14 aa, Severe acute respiratory syndrome coronavirus 2
  REGION 1..14: note = Table B: HLA-DRB1*11:01L
KYFSGAMDTTSYRE

SEQ ID NO: 22661 - protein, 13 aa, Severe acute respiratory syndrome coronavirus 2
  REGION 1..13: note = Table B: HLA-DRB1*11:01L
QSGFRKMAFPSGK

SEQ ID NO: 22662 - protein, 15 aa, Severe acute respiratory syndrome coronavirus 2
  REGION 1..15: note = Table B: HLA-DRB1*11:01L HLA-DPA1*01:03-B1*04:01L HLA-DPA1*01:03-B1*02:01L
LNGLWLDDVVYCPRH

SEQ ID NO: 22663 - protein, 14 aa, Severe acute respiratory syndrome coronavirus 2
  REGION 1..14: note = Table B: HLA-DRB1*11:01L
PNYEDLLIRKSNHN

SEQ ID NO: 22664 - protein, 15 aa, Severe acute respiratory syndrome coronavirus 2
  REGION 1..15: note = Table B: HLA-DRB1*11:01L HLA-DPA1*01:03-B1*04:01L HLA-DPA1*01:03-B1*104:01L HLA-DRB1*07:01L
YEPLTQDHVDILGPL

SEQ ID NO: 22665 - protein, 15 aa, Severe acute respiratory syndrome coronavirus 2
  REGION 1..15: note = Table B: HLA-DRB1*11:01L HLA-DPA1*01:03-B1*104:01L
ILGPLSAQTGIAVLD

SEQ ID NO: 22666 - protein, 15 aa, Severe acute respiratory syndrome coronavirus 2
  REGION 1..15: note = Table B: HLA-DRB1*11:01L HLA-DRB3*01:01L HLA-DRB1*04:08L HLA-DRB1*15:03L
VKRTIKGTHHWLLLT

SEQ ID NO: 22667 - protein, 15 aa, Severe acute respiratory syndrome coronavirus 2
  REGION 1..15: note = Table B: HLA-DRB1*11:01L
LDNRATLQAIASEFS

SEQ ID NO: 22668 - protein, 15 aa, Severe acute respiratory syndrome coronavirus 2
  REGION 1..15: note = Table B: HLA-DRB1*11:01L HLA-DPA1*03:01-B1*105:01L
LKKSLNVAKSEFDRD

SEQ ID NO: 22669 - protein, 14 aa, Severe acute respiratory syndrome coronavirus 2
  REGION 1..14: note = Table B: HLA-DRB1*11:01L
EFDRDAAMQRKLEK

SEQ ID NO: 22670 - protein, 14 aa, Severe acute respiratory syndrome coronavirus 2
  REGION 1..14: note = Table B: HLA-DRB1*11:01L
QQVVDADSKIVQLS

SEQ ID NO: 22671 - protein, 13 aa, Severe acute respiratory syndrome coronavirus 2
  REGION 1..13: note = Table B: HLA-DRB1*11:01L HLA-DRB1*13:01L
VVDADSKIVQLSE

SEQ ID NO: 22672 - protein, 14 aa, Severe acute respiratory syndrome coronavirus 2
  REGION 1..14: note = Table B: HLA-DRB1*11:01L
WPLIVTALRANSAV

SEQ ID NO: 22673 - protein, 14 aa, Severe acute respiratory syndrome coronavirus 2
  REGION 1..14: note = Table B: HLA-DRB1*11:01L
KYLYFIKGLNNLNR

SEQ ID NO: 22674 - protein, 14 aa, Severe acute respiratory syndrome coronavirus 2
  REGION 1..14: note = Table B: HLA-DRB1*11:01L
QPITNCVKMLCTHT

SEQ ID NO: 22675 - protein, 17 aa, Severe acute respiratory syndrome coronavirus 2
  REGION 1..17: note = Table B: HLA-DRB1*11:01L
AKHDFFKFRIDGDMVPH

SEQ ID NO: 22676 - protein, 15 aa, Severe acute respiratory syndrome coronavirus 2
  REGION 1..15: note = Table B: HLA-DRB1*11:01L
FKFRIDGDMVPHISR

SEQ ID NO: 22677 - protein, 14 aa, Severe acute respiratory syndrome coronavirus 2
  REGION 1..14: note = Table B: HLA-DRB1*11:01L
TKYTMADLVYALRH

SEQ ID NO: 22678 - protein, 13 aa, Severe acute respiratory syndrome coronavirus 2
  REGION 1..13: note = Table B: HLA-DRB1*11:01L HLA-DRB1*10:01L HLA-DRB1*15:03L
GYHFRELGVVHNQ

SEQ ID NO: 22679 - protein, 13 aa, Severe acute respiratory syndrome coronavirus 2
  REGION 1..13: note = Table B: HLA-DRB1*11:01L HLA-DPA1*01:03-B1*104:01L HLA-DRB1*08:02L
FSVAALTNNVAFQ

SEQ ID NO: 22680 - protein, 17 aa, Severe acute respiratory syndrome coronavirus 2
  REGION 1..17: note = Table B: HLA-DRB1*11:01L HLA-DRB1*08:03L
EGSSVELKHFFFAQDGN

SEQ ID NO: 22681 - protein, 14 aa, Severe acute respiratory syndrome coronavirus 2
  REGION 1..14: note = Table B: HLA-DRB1*11:01L
GFPFNKWGKARLYY

SEQ ID NO: 22682 - protein, 16 aa, Severe acute respiratory syndrome coronavirus 2
  REGION 1..16: note = Table B: HLA-DRB1*11:01L HLA-DRB3*01:01L HLA-DPA1*02:01-B1*13:01L
GVSICSTMTNRQFHQK

SEQ ID NO: 22683 - protein, 16 aa, Severe acute respiratory syndrome coronavirus 2
  REGION 1..16: note = Table B: HLA-DRB1*11:01L HLA-DPA1*01:03-B1*02:01L
WHNMLKTVYSDVENPH

SEQ ID NO: 22684 - protein, 13 aa, Severe acute respiratory syndrome coronavirus 2
  REGION 1..13: note = Table B: HLA-DRB1*11:01L HLA-DRB4*02:01NL HLA-DRB1*04:10L HLA-DPA1*02:01-B1*13:01L HLA-DPA1*01:03-B1*104:01L HLA-DRB1*14:17L
GDATTAYANSVFN

SEQ ID NO: 22685 - protein, 12 aa, Severe acute respiratory syndrome coronavirus 2
  REGION 1..12: note = Table B: HLA-DRB1*11:01L HLA-DRB1*04:08L
RLYECLYRNRDV

SEQ ID NO: 22686 - protein, 15 aa, Severe acute respiratory syndrome coronavirus 2
  REGION 1..15: note = Table B: HLA-DRB1*11:01L
KSVLYYQNNVFMSEA

SEQ ID NO: 22687 - protein, 14 aa, Severe acute respiratory syndrome coronavirus 2
  REGION 1..14: note = Table B: HLA-DRB1*11:01L
HLSWEVGKPRPPLN

SEQ ID NO: 22688 - protein, 15 aa, Severe acute respiratory syndrome coronavirus 2
  REGION 1..15: note = Table B: HLA-DRB1*11:01L
EKGDYGDAVVYRGTT

SEQ ID NO: 22689 - protein, 15 aa, Severe acute respiratory syndrome coronavirus 2
  REGION 1..15: note = Table B: HLA-DRB1*11:01L HLA-DPA1*01:03-B1*04:01L HLA-DPA1*01:03-B1*04:02L HLA-DPA1*01:03-B1*02:01L HLA-DRB1*15:03L
NARLRAKHYVYIGDP

SEQ ID NO: 22690 - protein, 14 aa, Severe acute respiratory syndrome coronavirus 2
  REGION 1..14: note = Table B: HLA-DRB1*11:01L
KHYVYIGDPAQLPA

SEQ ID NO: 22691 - protein, 13 aa, Severe acute respiratory syndrome coronavirus 2
  REGION 1..13: note = Table B: HLA-DRB1*11:01L HLA-DRB4*02:01NL HLA-DRB3*01:01L HLA-DPA1*01:03-B1*02:01L
IVDTVSALVYDNK

SEQ ID NO: 22692 - protein, 16 aa, Severe acute respiratory syndrome coronavirus 2
  REGION 1..16: note = Table B: HLA-DRB1*11:01L
SAQCFKMFYKGVITHD

SEQ ID NO: 22693 - protein, 15 aa, Severe acute respiratory syndrome coronavirus 2
  REGION 1..15: note = Table B: HLA-DRB1*11:01L HLA-DQA1*01:03-B1*06:01L HLA-DQA1*02:01-B1*03:03L
ITRAKVGILCIMSDR

SEQ ID NO: 22694 - protein, 13 aa, Severe acute respiratory syndrome coronavirus 2
  REGION 1..13: note = Table B: HLA-DRB1*11:01L HLA-DRB1*08:03L
KVITGLHPTQAPT

SEQ ID NO: 22695 - protein, 14 aa, Severe acute respiratory syndrome coronavirus 2
  REGION 1..14: note = Table B: HLA-DRB1*11:01L
GYPNMFITREEAIR

SEQ ID NO: 22696 - protein, 15 aa, Severe acute respiratory syndrome coronavirus 2
  REGION 1..15: note = Table B: HLA-DRB1*11:01L HLA-DRB1*15:01L
VPTGYVDTPNNTDFS

SEQ ID NO: 22697 - protein, 13 aa, Severe acute respiratory syndrome coronavirus 2
  REGION 1..13: note = Table B: HLA-DRB1*11:01L
VKAALLADKFPVL

SEQ ID NO: 22698 - protein, 17 aa, Severe acute respiratory syndrome coronavirus 2
  REGION 1..17: note = Table B: HLA-DRB1*11:01L HLA-DPA1*01:03-B1*04:02L HLA-DPA1*01:03-B1*104:01L HLA-DRB1*10:01L
VETFYPKLQSSQAWQPG

SEQ ID NO: 22699 - protein, 12 aa, Severe acute respiratory syndrome coronavirus 2
  REGION 1..12: note = Table B: HLA-DRB1*11:01L
NLYKMQRMLLEK

SEQ ID NO: 22700 - protein, 14 aa, Severe acute respiratory syndrome coronavirus 2
  REGION 1..14: note = Table B: HLA-DRB1*11:01L HLA-DRB3*01:01L
EHSWNADLYKLMGH

SEQ ID NO: 22701 - protein, 13 aa, Severe acute respiratory syndrome coronavirus 2
  REGION 1..13: note = Table B: HLA-DRB1*11:01L HLA-DPA1*01:03-B1*02:01L
DKVFRSSVLHSTQ

SEQ ID NO: 22702 - protein, 16 aa, Severe acute respiratory syndrome coronavirus 2
  REGION 1..16: note = Table B: HLA-DRB1*11:01L HLA-DRB1*08:03L
SNIIRGWIFGTTLDSK

SEQ ID NO: 22703 - protein, 11 aa, Severe acute respiratory syndrome coronavirus 2
  REGION 1..11: note = Table B: HLA-DRB1*11:01L HLA-DRB1*12:01L HLA-DPA1*01:02-B1*04:01L HLA-DRB1*08:02L
REFVFKNIDGY

SEQ ID NO: 22704 - protein, 11 aa, Severe acute respiratory syndrome coronavirus 2
  REGION 1..11: note = Table B: HLA-DRB1*11:01L
YYVGYLQPRTF

SEQ ID NO: 22705 - protein, 13 aa, Severe acute respiratory syndrome coronavirus 2
  REGION 1..13: note = Table B: HLA-DRB1*11:01L
NYLYRLFRKSNLK

SEQ ID NO: 22706 - protein, 14 aa, Severe acute respiratory syndrome coronavirus 2
  REGION 1..14: note = Table B: HLA-DRB1*11:01L
LLQYGSFCTQLNRA

SEQ ID NO: 22707 - protein, 14 aa, Severe acute respiratory syndrome coronavirus 2
  REGION 1..14: note = Table B: HLA-DRB1*11:01L
IANQFNSAIGKIQD

SEQ ID NO: 22708 - protein, 15 aa, Severe acute respiratory syndrome coronavirus 2
  REGION 1..15: note = Table B: HLA-DRB1*11:01L
DVVNQNAQALNTLVK

SEQ ID NO: 22709 - protein, 13 aa, Severe acute respiratory syndrome coronavirus 2
  REGION 1..13: note = Table B: HLA-DRB1*11:01L HLA-DRB1*04:10L HLA-DRB1*15:03L
NDILSRLDKVEAE

SEQ ID NO: 22710 - protein, 15 aa, Severe acute respiratory syndrome coronavirus 2
  REGION 1..15: note = Table B: HLA-DRB1*11:01L HLA-DPA1*01:02-B1*04:01L HLA-DRB1*07:01L HLA-DRB1*16:01L HLA-DRB1*15:03L
AATKMSECVLGQSKR

SEQ ID NO: 22711 - protein, 15 aa, Severe acute respiratory syndrome coronavirus 2
  REGION 1..15: note = Table B: HLA-DRB1*11:01L
GQSKRVDFCGKGYHL

SEQ ID NO: 22712 - protein, 18 aa, Severe acute respiratory syndrome coronavirus 2
  REGION 1..18: note = Table B: HLA-DRB1*11:01L HLA-DPA1*03:01-B1*105:01L
DGKAHFPREGVFVSNGTH

SEQ ID NO: 22713 - protein, 14 aa, Severe acute respiratory syndrome coronavirus 2
  REGION 1..14: note = Table B: HLA-DRB1*11:01L
LIDLQELGKYEQYI

SEQ ID NO: 22714 - protein, 14 aa, Severe acute respiratory syndrome coronavirus 2
  REGION 1..14: note = Table B: HLA-DRB1*11:01L
EEHVQIHTIDGSSG

SEQ ID NO: 22715 - protein, 17 aa, Severe acute respiratory syndrome coronavirus 2
  REGION 1..17: note = Table B: HLA-DRB1*11:01L HLA-DRB4*01:01L
EHVQIHTIDGSSGVVNP

SEQ ID NO: 22716 - protein, 14 aa, Severe acute respiratory syndrome coronavirus 2
  REGION 1..14: note = Table B: HLA-DRB1*11:01L HLA-DQA1*05:05-B1*03:116L HLA-DRB1*15:03L
IDGSSGVVNPVMEP

SEQ ID NO: 22717 - protein, 15 aa, Severe acute respiratory syndrome coronavirus 2
  REGION 1..15: note = Table B: HLA-DRB1*11:01L HLA-DPA1*01:02-B1*04:01L HLA-DRB1*08:02L
TENKYSQLDEEQPME

SEQ ID NO: 22718 - protein, 16 aa, Severe acute respiratory syndrome coronavirus 2
  REGION 1..16: note = Table B: HLA-DRB1*11:01L
KLFIRQEEVQELYSPI

SEQ ID NO: 22719 - protein, 16 aa, Severe acute respiratory syndrome coronavirus 2
  REGION 1..16: note = Table B: HLA-DRB1*11:01L HLA-DQA1*02:01-B1*03:03L
VAAFHQECSLQSCTQH

SEQ ID NO: 22720 - protein, 18 aa, Severe acute respiratory syndrome coronavirus 2
  REGION 1..18: note = Table B: HLA-DRB1*11:01L
LPFTINCQEPKLGSLVVR

SEQ ID NO: 22721 - protein, 16 aa, Severe acute respiratory syndrome coronavirus 2
  REGION 1..16: note = Table B: HLA-DRB1*11:01L HLA-DQA1*05:01-B1*02:01L HLA-DPA1*01:03-B1*04:02L
TPGSSRGTSPARMAGN

SEQ ID NO: 22722 - protein, 14 aa, Severe acute respiratory syndrome coronavirus 2
  REGION 1..14: note = Table B: HLA-DRB1*11:01L
GTDYKHWPQIAQFA

SEQ ID NO: 22723 - protein, 13 aa, Severe acute respiratory syndrome coronavirus 2
  REGION 1..13: note = Table B: HLA-DRB1*11:01L HLA-DPA1*01:03-B1*04:02L
YTGAIKLDDKDPN

SEQ ID NO: 22724 - protein, 15 aa, Severe acute respiratory syndrome coronavirus 2
  REGION 1..15: note = Table B: HLA-DRB5*01:01L HLA-DRB1*09:01L HLA-DPA1*01:03-B1*04:02L HLA-DRB1*07:01L
TQYEYGTEDDYQGKP

SEQ ID NO: 22725 - protein, 11 aa, Severe acute respiratory syndrome coronavirus 2
  REGION 1..11: note = Table B: HLA-DRB5*01:01L HLA-DRB1*15:01L
TTYPGQGLNGY

SEQ ID NO: 22726 - protein, 17 aa, Severe acute respiratory syndrome coronavirus 2
  REGION 1..17: note = Table B: HLA-DRB5*01:01L HLA-DRB1*13:01L HLA-DRB1*15:01L
DTNVLEGSVAYESLRPD

SEQ ID NO: 22727 - protein, 16 aa, Severe acute respiratory syndrome coronavirus 2
  REGION 1..16: note = Table B: HLA-DRB5*01:01L
DVQQWGFTGNLQSNHD

SEQ ID NO: 22728 - protein, 15 aa, Severe acute respiratory syndrome coronavirus 2
  REGION 1..15: note = Table B: HLA-DRB5*01:01L HLA-DRB4*02:01NL HLA-DRB1*08:02L
LRQWLPTGTLLVDSD

SEQ ID NO: 22729 - protein, 15 aa, Severe acute respiratory syndrome coronavirus 2
  REGION 1..15: note = Table B: HLA-DRB5*01:01L
ENQKLIANQFNSAIG

SEQ ID NO: 22730 - protein, 10 aa, Severe acute respiratory syndrome coronavirus 2
  REGION 1..10: note = Table B: HLA-DQA1*01-B1*05L
VPGFNEKTHV

SEQ ID NO: 22731 - protein, 10 aa, Severe acute respiratory syndrome coronavirus 2
  REGION 1..10: note = Table B: HLA-DQA1*01-B1*05L
LVRGFGDSVE

SEQ ID NO: 22732 - protein, 11 aa, Severe acute respiratory syndrome coronavirus 2
  REGION 1..11: note = Table B: HLA-DQA1*01-B1*05L
LKSFDLGDELG

SEQ ID NO: 22733 - protein, 13 aa, Severe acute respiratory syndrome coronavirus 2
  REGION 1..13: note = Table B: HLA-DQA1*01-B1*05L
FDLGDELGTDPYE

SEQ ID NO: 22734 - protein, 10 aa, Severe acute respiratory syndrome coronavirus 2
  REGION 1..10: note = Table B: HLA-DQA1*01-B1*05L
DELGTDPYED

SEQ ID NO: 22735 - protein, 10 aa, Severe acute respiratory syndrome coronavirus 2
  REGION 1..10: note = Table B: HLA-DQA1*01-B1*05L
GTDPYEDFQE

SEQ ID NO: 22736 - protein, 10 aa, Severe acute respiratory syndrome coronavirus 2
  REGION 1..10: note = Table B: HLA-DQA1*01-B1*05L
TDPYEDFQEN

SEQ ID NO: 22737 - protein, 10 aa, Severe acute respiratory syndrome coronavirus 2
  REGION 1..10: note = Table B: HLA-DQA1*01-B1*05L
PYEDFQENWN

SEQ ID NO: 22738 - protein, 14 aa, Severe acute respiratory syndrome coronavirus 2
  REGION 1..14: note = Table B: HLA-DQA1*01-B1*05L HLA-DPA1*03:01-B1*105:01L
AYTRYVDNNFCGPD

SEQ ID NO: 22739 - protein, 11 aa, Severe acute respiratory syndrome coronavirus 2
  REGION 1..11: note = Table B: HLA-DQA1*01-B1*05L
LSEQLDFIDTK

SEQ ID NO: 22740 - protein, 10 aa, Severe acute respiratory syndrome coronavirus 2
  REGION 1..10: note = Table B: HLA-DQA1*01-B1*05L HLA-DQA1*03:01-B1*03:02L HLA-DQA1*01:03-B1*06:01L
EIAWYTERSE

SEQ ID NO: 22741 - protein, 10 aa, Severe acute respiratory syndrome coronavirus 2
  REGION 1..10: note = Table B: HLA-DQA1*01-B1*05L
LAEYHNESGL

SEQ ID NO: 22742 - protein, 10 aa, Severe acute respiratory syndrome coronavirus 2
  REGION 1..10: note = Table B: HLA-DQA1*01-B1*05L
SEGLNDNLLE

SEQ ID NO: 22743 - protein, 11 aa, Severe acute respiratory syndrome coronavirus 2
  REGION 1..11: note = Table B: HLA-DQA1*01-B1*05L HLA-DQA1*03:01-B1*03:02L
VGDFKLNEEIA

SEQ ID NO: 22744 - protein, 13 aa, Severe acute respiratory syndrome coronavirus 2
  REGION 1..13: note = Table B: HLA-DQA1*01-B1*05L HLA-DRB1*04:08L
VVRSIFSRTLETA

SEQ ID NO: 22745 - protein, 10 aa, Severe acute respiratory syndrome coronavirus 2
  REGION 1..10: note = Table B: HLA-DQA1*01-B1*05L
ISQYSLRLID

SEQ ID NO: 22746 - protein, 12 aa, Severe acute respiratory syndrome coronavirus 2
  REGION 1..12: note = Table B: HLA-DQA1*01-B1*05L
IDAMMFTSDLAT

SEQ ID NO: 22747 - protein, 12 aa, Severe acute respiratory syndrome coronavirus 2
  REGION 1..12: note = Table B: HLA-DQA1*01-B1*05L
DAMMFTSDLATN

SEQ ID NO: 22748 - protein, 11 aa, Severe acute respiratory syndrome coronavirus 2
  REGION 1..11: note = Table B: HLA-DQA1*01-B1*05L HLA-DQA1*05:01-B1*02:01L
KPVLDWLEEKF

SEQ ID NO: 22749 - protein, 10 aa, Severe acute respiratory syndrome coronavirus 2
  REGION 1..10: note = Table B: HLA-DQA1*01-B1*05L
VLDWLEEKFK

SEQ ID NO: 22750 - protein, 11 aa, Severe acute respiratory syndrome coronavirus 2
  REGION 1..11: note = Table B: HLA-DQA1*01-B1*05L HLA-DQA1*01:03-B1*06:01L
EGVEFLRDGWE

SEQ ID NO: 22751 - protein, 12 aa, Severe acute respiratory syndrome coronavirus 2
  REGION 1..12: note = Table B: HLA-DQA1*01-B1*05L HLA-DQA1*03:01-B1*03:02L
APKEIIFLEGET

SEQ ID NO: 22752 - protein, 11 aa, Severe acute respiratory syndrome coronavirus 2
  REGION 1..11: note = Table B: HLA-DQA1*01-B1*05L HLA-DQA1*05:01-B1*02:01L
LEGETLPTEVL

SEQ ID NO: 22753 - protein, 12 aa, Severe acute respiratory syndrome coronavirus 2
  REGION 1..12: note = Table B: HLA-DQA1*01-B1*05L HLA-DQA1*05:01-B1*02:01L HLA-DQA1*03:01-B1*03:02L
TLPTEVLTEEVV

SEQ ID NO: 22754 - protein, 12 aa, Severe acute respiratory syndrome coronavirus 2
  REGION 1..12: note = Table B: HLA-DQA1*01-B1*05L HLA-DQA1*05:01-B1*02:01L
LPTEVLTEEVVL

SEQ ID NO: 22755 - protein, 11 aa, Severe acute respiratory syndrome coronavirus 2
  REGION 1..11: note = Table B: HLA-DQA1*01-B1*05L HLA-DQA1*03:01-B1*03:02L HLA-DQA1*02:01-B1*03:03L
APTKVTFGDDT

SEQ ID NO: 22756 - protein, 12 aa, Severe acute respiratory syndrome coronavirus 2
  REGION 1..12: note = Table B: HLA-DQA1*01-B1*05L
PTKVTFGDDTVI

SEQ ID NO: 22757 - protein, 10 aa, Severe acute respiratory syndrome coronavirus 2
  REGION 1..10: note = Table B: HLA-DQA1*01-B1*05L HLA-DQA1*05:01-B1*02:01L
VTFGDDTVIE

SEQ ID NO: 22758 - protein, 12 aa, Severe acute respiratory syndrome coronavirus 2
  REGION 1..12: note = Table B: HLA-DQA1*01-B1*05L
TFGDDTVIEVQG

SEQ ID NO: 22759 - protein, 14 aa, Severe acute respiratory syndrome coronavirus 2
  REGION 1..14: note = Table B: HLA-DQA1*01-B1*05L HLA-DQA1*01:03-B1*06:01L
GTEVNEFACVVADA

SEQ ID NO: 22760 - protein, 13 aa, Severe acute respiratory syndrome coronavirus 2
  REGION 1..13: note = Table B: HLA-DQA1*01-B1*05L
SELLTPLGIDLDE

SEQ ID NO: 22761 - protein, 11 aa, Severe acute respiratory syndrome coronavirus 2
  REGION 1..11: note = Table B: HLA-DQA1*01-B1*05L
TPLGIDLDEWS

SEQ ID NO: 22762 - protein, 15 aa, Severe acute respiratory syndrome coronavirus 2
  REGION 1..15: note = Table B: HLA-DQA1*01-B1*05L HLA-DQA1*05:01-B1*02:01L HLA-DPA1*01:03-B1*04:02L HLA-DPA1*01:02-B1*04:01L HLA-DQA1*01:03-B1*06:01L
DEWSMATYYLFDESG

SEQ ID NO: 22763 - protein, 12 aa, Severe acute respiratory syndrome coronavirus 2
  REGION 1..12: note = Table B: HLA-DQA1*01-B1*05L
MATYYLFDESGE

SEQ ID NO: 22764 - protein, 13 aa, Severe acute respiratory syndrome coronavirus 2
  REGION 1..13: note = Table B: HLA-DQA1*01-B1*05L
SHMYCSFYPPDED

SEQ ID NO: 22765 - protein, 13 aa, Severe acute respiratory syndrome coronavirus 2
  REGION 1..13: note = Table B: HLA-DQA1*01-B1*05L
HMYCSFYPPDEDE

SEQ ID NO: 22766 - protein, 10 aa, Severe acute respiratory syndrome coronavirus 2
  REGION 1..10: note = Table B: HLA-DQA1*01-B1*05L
SFYPPDEDEE

SEQ ID NO: 22767 - protein, 19 aa, Severe acute respiratory syndrome coronavirus 2
  REGION 1..19: note = Table B: HLA-DQA1*01-B1*05L
YPPDEDEEEGDCEEEEFEP

SEQ ID NO: 22768 - protein, 14 aa, Severe acute respiratory syndrome coronavirus 2
  REGION 1..14: note = Table B: HLA-DQA1*01-B1*05L
EEGDCEEEEFEPST

SEQ ID NO: 22769 - protein, 13 aa, Severe acute respiratory syndrome coronavirus 2
  REGION 1..13: note = Table B: HLA-DQA1*01-B1*05L
GDCEEEEFEPSTQ

SEQ ID NO: 22770 - protein, 13 aa, Severe acute respiratory syndrome coronavirus 2
  REGION 1..13: note = Table B: HLA-DQA1*01-B1*05L
PSTQYEYGTEDDY

SEQ ID NO: 22771 - protein, 10 aa, Severe acute respiratory syndrome coronavirus 2
  REGION 1..10: note = Table B: HLA-DQA1*01-B1*05L
YEYGTEDDYQ

SEQ ID NO: 22772 - protein, 11 aa, Severe acute respiratory syndrome coronavirus 2
  REGION 1..11: note = Table B: HLA-DQA1*01-B1*05L
EEQEEDWLDDD

SEQ ID NO: 22773 - protein, 11 aa, Severe acute respiratory syndrome coronavirus 2
  REGION 1..11: note = Table B: HLA-DQA1*01-B1*05L
EQEEDWLDDDS

SEQ ID NO: 22774 - protein, 10 aa, Severe acute respiratory syndrome coronavirus 2
  REGION 1..10: note = Table B: HLA-DQA1*01-B1*05L
EEDWLDDDSQ

SEQ ID NO: 22775 - protein, 10 aa, Severe acute respiratory syndrome coronavirus 2
  REGION 1..10: note = Table B: HLA-DQA1*01-B1*05L
EDWLDDDSQQ

SEQ ID NO: 22776 - protein, 12 aa, Severe acute respiratory syndrome coronavirus 2
  REGION 1..12: note = Table B: HLA-DQA1*01-B1*05L
DWLDDDSQQTVG

SEQ ID NO: 22777 - protein, 11 aa, Severe acute respiratory syndrome coronavirus 2
  REGION 1..11: note = Table B: HLA-DQA1*01-B1*05L
DNVYIKNADIV

SEQ ID NO: 22778 - protein, 11 aa, Severe acute respiratory syndrome coronavirus 2
  REGION 1..11: note = Table B: HLA-DQA1*01-B1*05L HLA-DQA1*03:01-B1*03:02L HLA-DRB1*16:01L HLA-DQA1*01:03-B1*06:01L HLA-DQA1*02:01-B1*03:03L
YIKNADIVEEA

SEQ ID NO: 22779 - protein, 11 aa, Severe acute respiratory syndrome coronavirus 2
  REGION 1..11: note = Table B: HLA-DQA1*01-B1*05L
AMQVESDDYIA

SEQ ID NO: 22780 - protein, 12 aa, Severe acute respiratory syndrome coronavirus 2
  REGION 1..12: note = Table B: HLA-DQA1*01-B1*05L HLA-DQA1*05:01-B1*02:01L
MQVESDDYIATN

SEQ ID NO: 22781 - protein, 11 aa, Severe acute respiratory syndrome coronavirus 2
  REGION 1..11: note = Table B: HLA-DQA1*01-B1*05L HLA-DQA1*01:03-B1*06:01L
LVSSFLEMKSE

SEQ ID NO: 22782 - protein, 12 aa, Severe acute respiratory syndrome coronavirus 2
  REGION 1..12: note = Table B: HLA-DQA1*01-B1*05L HLA-DRB1*15:03L
ENLLLYIDINGN

SEQ ID NO: 22783 - protein, 13 aa, Severe acute respiratory syndrome coronavirus 2
  REGION 1..13: note = Table B: HLA-DQA1*01-B1*05L
SATLVSDIDITFL

SEQ ID NO: 22784 - protein, 11 aa, Severe acute respiratory syndrome coronavirus 2
  REGION 1..11: note = Table B: HLA-DQA1*01-B1*05L HLA-DQA1*03:01-B1*03:02L
DAPYIVGDVVQ

SEQ ID NO: 22785 - protein, 11 aa, Severe acute respiratory syndrome coronavirus 2
  REGION 1..11: note = Table B: HLA-DQA1*01-B1*05L HLA-DQA1*03:01-B1*03:02L
PYIVGDVVQEG

SEQ ID NO: 22786 - protein, 13 aa, Severe acute respiratory syndrome coronavirus 2
  REGION 1..13: note = Table B: HLA-DQA1*01-B1*05L
VPATVSVSSPDAV

SEQ ID NO: 22787 - protein, 10 aa, Severe acute respiratory syndrome coronavirus 2
  REGION 1..10: note = Table B: HLA-DQA1*01-B1*05L
AVTAYNGYLT

SEQ ID NO: 22788 - protein, 10 aa, Severe acute respiratory syndrome coronavirus 2
  REGION 1..10: note = Table B: HLA-DQA1*01-B1*05L HLA-DQA1*05:05-B1*03:19L HLA-DQA1*05:05-B1*03:116L HLA-DPA1*02:01-B1*13:01L
TPEEHFIETI

SEQ ID NO: 22789 - protein, 10 aa, Severe acute respiratory syndrome coronavirus 2
  REGION 1..10: note = Table B: HLA-DQA1*01-B1*05L
AGSYKDWSYS

SEQ ID NO: 22790 - protein, 10 aa, Severe acute respiratory syndrome coronavirus 2
  REGION 1..10: note = Table B: HLA-DQA1*01-B1*05L
GSYKDWSYSG

SEQ ID NO: 22791 - protein, 11 aa, Severe acute respiratory syndrome coronavirus 2
  REGION 1..11: note = Table B: HLA-DQA1*01-B1*05L HLA-DQA1*03:01-B1*03:02L
KDWSYSGQSTQ

SEQ ID NO: 22792 - protein, 11 aa, Severe acute respiratory syndrome coronavirus 2
  REGION 1..11: note = Table B: HLA-DQA1*01-B1*05L
NPTTFHLDGEV

SEQ ID NO: 22793 - protein, 11 aa, Severe acute respiratory syndrome coronavirus 2
  REGION 1..11: note = Table B: HLA-DQA1*01-B1*05L HLA-DQA1*03:01-B1*03:02L
GPTYLDGADVT

SEQ ID NO: 22794 - protein, 10 aa, Severe acute respiratory syndrome coronavirus 2
  REGION 1..10: note = Table B: HLA-DQA1*01-B1*05L
KTFYVLPNDD

SEQ ID NO: 22795 - protein, 10 aa, Severe acute respiratory syndrome coronavirus 2
  REGION 1..10: note = Table B: HLA-DQA1*01-B1*05L HLA-DQA1*05:01-B1*02:01L HLA-DQA1*03:01-B1*03:02L
DDTLRVEAFE

SEQ ID NO: 22796 - protein, 12 aa, Severe acute respiratory syndrome coronavirus 2
  REGION 1..12: note = Table B: HLA-DQA1*01-B1*05L HLA-DPA1*03:01-B1*105:01L HLA-DPA1*01:02-B1*04:01L
VEAFEYYHTTDP

SEQ ID NO: 22797 - protein, 10 aa, Severe acute respiratory syndrome coronavirus 2
  REGION 1..10: note = Table B: HLA-DQA1*01-B1*05L
FEYYHTTDPS

SEQ ID NO: 22798 - protein, 11 aa, Severe acute respiratory syndrome coronavirus 2
  REGION 1..11: note = Table B: HLA-DQA1*01-B1*05L HLA-DQA1*02:01-B1*03:03L HLA-DRB1*15:03L
TSIKWADNNCY

SEQ ID NO: 22799 - protein, 11 aa, Severe acute respiratory syndrome coronavirus 2
  REGION 1..11: note = Table B: HLA-DQA1*01-B1*05L
MSYLFQHANLD

SEQ ID NO: 22800 - protein, 11 aa, Severe acute respiratory syndrome coronavirus 2
  REGION 1..11: note = Table B: HLA-DQA1*01-B1*05L HLA-DQA1*03:01-B1*03:02L
ATKYLVQQESP

SEQ ID NO: 22801 - protein, 14 aa, Severe acute respiratory syndrome coronavirus 2
  REGION 1..14: note = Table B: HLA-DQA1*01-B1*05L HLA-DPA1*02:01-B1*13:01L
ITSKETLYCIDGAL

SEQ ID NO: 22802 - protein, 13 aa, Severe acute respiratory syndrome coronavirus 2
  REGION 1..13: note = Table B: HLA-DQA1*01-B1*05L HLA-DRB1*15:03L
SKETLYCIDGALL

SEQ ID NO: 22803 - protein, 10 aa, Severe acute respiratory syndrome coronavirus 2
  REGION 1..10: note = Table B: HLA-DQA1*01-B1*05L HLA-DPA1*03:01-B1*105:01L HLA-DQA1*01:03-B1*06:01L
PITDVFYKEN

SEQ ID NO: 22804 - protein, 12 aa, Severe acute respiratory syndrome coronavirus 2
  REGION 1..12: note = Table B: HLA-DQA1*01-B1*05L
IKPVTYKLDGVV

SEQ ID NO: 22805 - protein, 10 aa, Severe acute respiratory syndrome coronavirus 2
  REGION 1..10: note = Table B: HLA-DQA1*01-B1*05L
NSYFTEQPID

SEQ ID NO: 22806 - protein, 10 aa, Severe acute respiratory syndrome coronavirus 2
  REGION 1..10: note = Table B: HLA-DQA1*01-B1*05L HLA-DQA1*03:01-B1*03:02L
DNIKFADDLN

SEQ ID NO: 22807 - protein, 10 aa, Severe acute respiratory syndrome coronavirus 2
  REGION 1..10: note = Table B: HLA-DQA1*01-B1*05L
KVTFFPDLNG

SEQ ID NO: 22808 - protein, 10 aa, Severe acute respiratory syndrome coronavirus 2
  REGION 1..10: note = Table B: HLA-DQA1*01-B1*05L
VTFFPDLNGD

SEQ ID NO: 22809 - protein, 11 aa, Severe acute respiratory syndrome coronavirus 2
  REGION 1..11: note = Table B: HLA-DQA1*01-B1*05L HLA-DQA1*02:01-B1*03:03L
KSEDAQGMDNL

SEQ ID NO: 22810 - protein, 11 aa, Severe acute respiratory syndrome coronavirus 2
  REGION 1..11: note = Table B: HLA-DQA1*01-B1*05L HLA-DQA1*05:01-B1*02:01L
EDLKPVSEEVV

SEQ ID NO: 22811 - protein, 10 aa, Severe acute respiratory syndrome coronavirus 2
  REGION 1..10: note = Table B: HLA-DQA1*01-B1*05L HLA-DQA1*03:01-B1*03:02L
EEVVENPTIQ

SEQ ID NO: 22812 - protein, 11 aa, Severe acute respiratory syndrome coronavirus 2
  REGION 1..11: note = Table B: HLA-DQA1*01-B1*05L HLA-DQA1*05:01-B1*02:01L HLA-DQA1*03:01-B1*03:02L HLA-DQA1*01:03-B1*06:01L HLA-DQA1*02:01-B1*03:03L
VKTTEVVGDII

SEQ ID NO: 22813 - protein, 11 aa, Severe acute respiratory syndrome coronavirus 2
  REGION 1..11: note = Table B: HLA-DQA1*01-B1*05L
EEVGHTDLMAA

SEQ ID NO: 22814 - protein, 10 aa, Severe acute respiratory syndrome coronavirus 2
  REGION 1..10: note = Table B: HLA-DQA1*01-B1*05L
LMAAYVDNSS

SEQ ID NO: 22815 - protein, 11 aa, Severe acute respiratory syndrome coronavirus 2
  REGION 1..11: note = Table B: HLA-DQA1*01-B1*05L
REGYLNSTNVT

SEQ ID NO: 22816 - protein, 10 aa, Severe acute respiratory syndrome coronavirus 2
  REGION 1..10: note = Table B: HLA-DQA1*01-B1*05L HLA-DQA1*05:01-B1*02:01L HLA-DQA1*03:01-B1*03:02L HLA-DQA1*01:03-B1*06:01L
DTYPSLETIQ

SEQ ID NO: 22817 - protein, 13 aa, Severe acute respiratory syndrome coronavirus 2
  REGION 1..13: note = Table B: HLA-DQA1*01-B1*05L HLA-DRB1*09:01L HLA-DPA1*01:03-B1*04:02L HLA-DPA1*02:01-B1*13:01L HLA-DPA1*01:03-B1*104:01L HLA-DPA1*01:02-B1*04:01L HLA-DRB1*10:01L HLA-DRB1*04:08L
IINLVQMAPISAM

SEQ ID NO: 22818 - protein, 11 aa, Severe acute respiratory syndrome coronavirus 2
  REGION 1..11: note = Table B: HLA-DQA1*01-B1*05L
AGSTFISDEVA

SEQ ID NO: 22819 - protein, 13 aa, Severe acute respiratory syndrome coronavirus 2
  REGION 1..13: note = Table B: HLA-DQA1*01-B1*05L HLA-DQA1*05:01-B1*02:01L
NPTDQSSYIVDSV

SEQ ID NO: 22820 - protein, 10 aa, Severe acute respiratory syndrome coronavirus 2
  REGION 1..10: note = Table B: HLA-DQA1*01-B1*05L
IHLYFDKAGQ

SEQ ID NO: 22821 - protein, 10 aa, Severe acute respiratory syndrome coronavirus 2
  REGION 1..10: note = Table B: HLA-DQA1*01-B1*05L
LSHFVNLDNL

SEQ ID NO: 22822 - protein, 13 aa, Severe acute respiratory syndrome coronavirus 2
  REGION 1..13: note = Table B: HLA-DQA1*01-B1*05L
SAKSASVYYSQLM

SEQ ID NO: 22823 - protein, 16 aa, Severe acute respiratory syndrome coronavirus 2
  REGION 1..16: note = Table B: HLA-DQA1*01-B1*05L
AKSASVYYSQLMCQPI

SEQ ID NO: 22824 - protein, 11 aa, Severe acute respiratory syndrome coronavirus 2
  REGION 1..11: note = Table B: HLA-DQA1*01-B1*05L HLA-DQA1*05:01-B1*02:01L HLA-DRB1*12:01L HLA-DQA1*03:01-B1*03:02L HLA-DQA1*02:01-B1*03:03L
KTLVATAEAEL

SEQ ID NO: 22825 - protein, 10 aa, Severe acute respiratory syndrome coronavirus 2
  REGION 1..10: note = Table B: HLA-DQA1*01-B1*05L HLA-DQA1*03:01-B1*03:02L
AKNVSLDNVL

SEQ ID NO: 22826 - protein, 13 aa, Severe acute respiratory syndrome coronavirus 2
  REGION 1..13: note = Table B: HLA-DQA1*01-B1*05L HLA-DPA1*02:01-B1*13:01L HLA-DPA1*01:03-B1*104:01L
FISAARQGFVDSD

SEQ ID NO: 22827 - protein, 11 aa, Severe acute respiratory syndrome coronavirus 2
  REGION 1..11: note = Table B: HLA-DQA1*01-B1*05L
AARQGFVDSDV

SEQ ID NO: 22828 - protein, 10 aa, Severe acute respiratory syndrome coronavirus 2
  REGION 1..10: note = Table B: HLA-DQA1*01-B1*05M HLA-DQA1*05:01-B1*02:01L HLA-DQA1*03:01-B1*03:02L
RQGFVDSDVE

SEQ ID NO: 22829 - protein, 10 aa, Severe acute respiratory syndrome coronavirus 2
  REGION 1..10: note = Table B: HLA-DQA1*01-B1*05L
QGFVDSDVET

SEQ ID NO: 22830 - protein, 10 aa, Severe acute respiratory syndrome coronavirus 2
  REGION 1..10: note = Table B: HLA-DQA1*01-B1*05L
LSHQSDIEVT

SEQ ID NO: 22831 - protein, 11 aa, Severe acute respiratory syndrome coronavirus 2
  REGION 1..11: note = Table B: HLA-DQA1*01-B1*05L HLA-DQA1*03:01-B1*03:02L HLA-DPA1*01:02-B1*04:01L HLA-DQA1*01:03-B1*06:01L HLA-DQA1*02:01-B1*03:03L
NNYMLTYNKVE

SEQ ID NO: 22832 - protein, 10 aa, Severe acute respiratory syndrome coronavirus 2
  REGION 1..10: note = Table B: HLA-DQA1*01-B1*05L
VKDFMSLSEQ

SEQ ID NO: 22833 - protein, 13 aa, Severe acute respiratory syndrome coronavirus 2
  REGION 1..13: note = Table B: HLA-DQA1*01-B1*05L
VMSKHTDFSSEII

SEQ ID NO: 22834 - protein, 12 aa, Severe acute respiratory syndrome coronavirus 2
  REGION 1..12: note = Table B: HLA-DQA1*01-B1*05L
ANKHADFDTWFS

SEQ ID NO: 22835 - protein, 12 aa, Severe acute respiratory syndrome coronavirus 2
  REGION 1..12: note = Table B: HLA-DQA1*01-B1*05L
NKHADFDTWFSQ

SEQ ID NO: 22836 - protein, 10 aa, Severe acute respiratory syndrome coronavirus 2
  REGION 1..10: note = Table B: HLA-DQA1*01-B1*05L
DFDTWFSQRG

SEQ ID NO: 22837 - protein, 13 aa, Severe acute respiratory syndrome coronavirus 2
  REGION 1..13: note = Table B: HLA-DQA1*01-B1*05L
ITREVGFVVPGLP

SEQ ID NO: 22838 - protein, 11 aa, Severe acute respiratory syndrome coronavirus 2
  REGION 1..11: note = Table B: HLA-DQA1*01-B1*05L HLA-DQA1*03:01-B1*03:02L
EVGFVVPGLPG

SEQ ID NO: 22839 - protein, 11 aa, Severe acute respiratory syndrome coronavirus 2
  REGION 1..11: note = Table B: HLA-DQA1*01-B1*05L
TPSKLIEYTDF

SEQ ID NO: 22840 - protein, 10 aa, Severe acute respiratory syndrome coronavirus 2
  REGION 1..10: note = Table B: HLA-DQA1*01-B1*05L
KLIEYTDFAT

SEQ ID NO: 22841 - protein, 10 aa, Severe acute respiratory syndrome coronavirus 2
  REGION 1..10: note = Table B: HLA-DQA1*01-B1*05L
LIEYTDFATS

SEQ ID NO: 22842 - protein, 12 aa, Severe acute respiratory syndrome coronavirus 2
  REGION 1..12: note = Table B: HLA-DQA1*01-B1*05L
KPVPYCYDTNVL

SEQ ID NO: 22843 - protein, 15 aa, Severe acute respiratory syndrome coronavirus 2
  REGION 1..15: note = Table B: HLA-DQA1*01-B1*05L
PVPYCYDTNVLEGSV

SEQ ID NO: 22844 - protein, 12 aa, Severe acute respiratory syndrome coronavirus 2
  REGION 1..12: note = Table B: HLA-DQA1*01-B1*05L
IQFPNTYLEGSV

SEQ ID NO: 22845 - protein, 11 aa, Severe acute respiratory syndrome coronavirus 2
  REGION 1..11: note = Table B: HLA-DQA1*01-B1*05L HLA-DQA1*01:03-B1*06:01L
VVTTFDSEYCR

SEQ ID NO: 22846 - protein, 11 aa, Severe acute respiratory syndrome coronavirus 2
  REGION 1..11: note = Table B: HLA-DQA1*01-B1*05L HLA-DPA1*01:02-B1*04:01L
LNNDYYRSLPG

SEQ ID NO: 22847 - protein, 10 aa, Severe acute respiratory syndrome coronavirus 2
  REGION 1..10: note = Table B: HLA-DQA1*01-B1*05L
FYWFFSNYLK

SEQ ID NO: 22848 - protein, 11 aa, Severe acute respiratory syndrome coronavirus 2
  REGION 1..11: note = Table B: HLA-DQA1*01-B1*05L
NKYKYFSGAMD

SEQ ID NO: 22849 - protein, 10 aa, Severe acute respiratory syndrome coronavirus 2
  REGION 1..10: note = Table B: HLA-DQA1*01-B1*05L
YKYFSGAMDT

SEQ ID NO: 22850 - protein, 11 aa, Severe acute respiratory syndrome coronavirus 2
  REGION 1..11: note = Table B: HLA-DQA1*01-B1*05L HLA-DQA1*05:01-B1*02:01L HLA-DQA1*03:01-B1*03:02L
NDFSNSGSDVL

SEQ ID NO: 22851 - protein, 11 aa, Severe acute respiratory syndrome coronavirus 2
  REGION 1..11: note = Table B: HLA-DQA1*01-B1*05L
TTLNGLWLDDV

SEQ ID NO: 22852 - protein, 10 aa, Severe acute respiratory syndrome coronavirus 2
  REGION 1..10: note = Table B: HLA-DQA1*01-B1*05L
LNGLWLDDVV

SEQ ID NO: 22853 - protein, 10 aa, Severe acute respiratory syndrome coronavirus 2
  REGION 1..10: note = Table B: HLA-DQA1*01-B1*05L HLA-DQA1*05:05-B1*03:19L HLA-DQA1*05:01-B1*02:01L
NGLWLDDVVY

SEQ ID NO: 22854 - protein, 11 aa, Severe acute respiratory syndrome coronavirus 2
  REGION 1..11: note = Table B: HLA-DQA1*01-B1*05L
EDMLNPNYEDL

SEQ ID NO: 22855 - protein, 10 aa, Severe acute respiratory syndrome coronavirus 2
  REGION 1..10: note = Table B: HLA-DQA1*01-B1*05L HLA-DQA1*05:01-B1*02:01L HLA-DQA1*03:01-B1*03:02L
NPNYEDLLIR

SEQ ID NO: 22856 - protein, 12 aa, Severe acute respiratory syndrome coronavirus 2
  REGION 1..12: note = Table B: HLA-DQA1*01-B1*05L HLA-DQA1*05:05-B1*03:19L HLA-DQA1*05:01-B1*02:01L
GTDLEGNFYGPF

SEQ ID NO: 22857 - protein, 12 aa, Severe acute respiratory syndrome coronavirus 2
  REGION 1..12: note = Table B: HLA-DQA1*01-B1*05L
TDLEGNFYGPFV

SEQ ID NO: 22858 - protein, 10 aa, Severe acute respiratory syndrome coronavirus 2
  REGION 1..10: note = Table B: HLA-DQA1*01-B1*05L
EGNFYGPFVD

SEQ ID NO: 22859 - protein, 10 aa, Severe acute respiratory syndrome coronavirus 2
  REGION 1..10: note = Table B: HLA-DQA1*01-B1*05L HLA-DQA1*03:01-B1*03:02L
NFYGPFVDRQ

SEQ ID NO: 22860 - protein, 10 aa, Severe acute respiratory syndrome coronavirus 2
  REGION 1..10: note = Table B: HLA-DQA1*01-B1*05L
FYGPFVDRQT

SEQ ID NO: 22861 - protein, 10 aa, Severe acute respiratory syndrome coronavirus 2
  REGION 1..10: note = Table B: HLA-DQA1*01-B1*05L
PFVDRQTAQA

SEQ ID NO: 22862 - protein, 11 aa, Severe acute respiratory syndrome coronavirus 2
  REGION 1..11: note = Table B: HLA-DQA1*01-B1*05L
TTLNDFNLVAM

SEQ ID NO: 22863 - protein, 10 aa, Severe acute respiratory syndrome coronavirus 2
  REGION 1..10: note = Table B: HLA-DQA1*01-B1*05L HLA-DQA1*03:01-B1*03:02L HLA-DPA1*01:02-B1*04:01L
LNDFNLVAMK

SEQ ID NO: 22864 - protein, 11 aa, Severe acute respiratory syndrome coronavirus 2
  REGION 1..11: note = Table B: HLA-DQA1*01-B1*05L
LVAMKYNYEPL

SEQ ID NO: 22865 - protein, 11 aa, Severe acute respiratory syndrome coronavirus 2
  REGION 1..11: note = Table B: HLA-DQA1*01-B1*05L
VAMKYNYEPLT

SEQ ID NO: 22866 - protein, 12 aa, Severe acute respiratory syndrome coronavirus 2
  REGION 1..12: note = Table B: HLA-DQA1*01-B1*05L
AMKYNYEPLTQD

SEQ ID NO: 22867 - protein, 11 aa, Severe acute respiratory syndrome coronavirus 2
  REGION 1..11: note = Table B: HLA-DQA1*01-B1*05L HLA-DQA1*03:01-B1*03:02L
TQDHVDILGPL

SEQ ID NO: 22868 - protein, 11 aa, Severe acute respiratory syndrome coronavirus 2
  REGION 1..11: note = Table B: HLA-DQA1*01-B1*05L HLA-DPA1*03:01-B1*105:01L
SALLEDEFTPF

SEQ ID NO: 22869 - protein, 10 aa, Severe acute respiratory syndrome coronavirus 2
  REGION 1..10: note = Table B: HLA-DQA1*01-B1*05L HLA-DQA1*05:01-B1*02:01L
LLEDEFTPFD

SEQ ID NO: 22870 - protein, 11 aa, Severe acute respiratory syndrome coronavirus 2
  REGION 1..11: note = Table B: HLA-DQA1*01-B1*05L HLA-DQA1*05:01-B1*02:01L HLA-DQA1*03:01-B1*03:02L
LEDEFTPFDVV

SEQ ID NO: 22871 - protein, 10 aa, Severe acute respiratory syndrome coronavirus 2
  REGION 1..10: note = Table B: HLA-DQA1*01-B1*05L HLA-DQA1*01:03-B1*06:01L
ENAFLPFAMG

SEQ ID NO: 22872 - protein, 12 aa, Severe acute respiratory syndrome coronavirus 2
  REGION 1..12: note = Table B: HLA-DQA1*01-B1*05L
TVAYFNMVYMPA

SEQ ID NO: 22873 - protein, 10 aa, Severe acute respiratory syndrome coronavirus 2
  REGION 1..10: note = Table B: HLA-DQA1*01-B1*05L
RIMTWLDMVD

SEQ ID NO: 22874 - protein, 10 aa, Severe acute respiratory syndrome coronavirus 2
  REGION 1..10: note = Table B: HLA-DQA1*01-B1*05L
IMTWLDMVDT

SEQ ID NO: 22875 - protein, 10 aa, Severe acute respiratory syndrome coronavirus 2
  REGION 1..10: note = Table B: HLA-DQA1*01-B1*05L HLA-DRB1*15:03L
YKVYYGNALD

SEQ ID NO: 22876 - protein, 10 aa, Severe acute respiratory syndrome coronavirus 2
  REGION 1..10: note = Table B: HLA-DQA1*01-B1*05L
VYDYLVSTQE

SEQ ID NO: 22877 - protein, 15 aa, Severe acute respiratory syndrome coronavirus 2
  REGION 1..15: note = Table B: HLA-DQA1*01-B1*05L HLA-DRB4*01:01L HLA-DPA1*01:03-B1*104:01L
LSVLQQLRVESSSKL

SEQ ID NO: 22878 - protein, 12 aa, Severe acute respiratory syndrome coronavirus 2
  REGION 1..12: note = Table B: HLA-DQA1*01-B1*05L HLA-DQA1*03:01-B1*03:02L
AQEAYEQAVANG

SEQ ID NO: 22879 - protein, 11 aa, Severe acute respiratory syndrome coronavirus 2
  REGION 1..11: note = Table B: HLA-DQA1*01-B1*05L
LNVAKSEFDRD

SEQ ID NO: 22880 - protein, 10 aa, Severe acute respiratory syndrome coronavirus 2
  REGION 1..10: note = Table B: HLA-DQA1*01-B1*05L
KLEKMADQAM

SEQ ID NO: 22881 - protein, 17 aa, Severe acute respiratory syndrome coronavirus 2
  REGION 1..17: note = Table B: HLA-DQA1*01-B1*05L HLA-DRB1*15:01L
ADQAMTQMYKQARSEDK

SEQ ID NO: 22882 - protein, 11 aa, Severe acute respiratory syndrome coronavirus 2
  REGION 1..11: note = Table B: HLA-DQA1*01-B1*05L
TMLRKLDNDAL

SEQ ID NO: 22883 - protein, 11 aa, Severe acute respiratory syndrome coronavirus 2
  REGION 1..11: note = Table B: HLA-DQA1*01-B1*05L
MLRKLDNDALN

SEQ ID NO: 22884 - protein, 12 aa, Severe acute respiratory syndrome coronavirus 2
  REGION 1..12: note = Table B: HLA-DQA1*01-B1*05L
RKLDNDALNNII

SEQ ID NO: 22885 - protein, 11 aa, Severe acute respiratory syndrome coronavirus 2
  REGION 1..11: note = Table B: HLA-DQA1*01-B1*05L HLA-DQA1*01:03-B1*06:01L HLA-DQA1*02:01-B1*03:03L
AKLMVVIPDYN

SEQ ID NO: 22886 - protein, 10 aa, Severe acute respiratory syndrome coronavirus 2
  REGION 1..10: note = Table B: HLA-DQA1*01-B1*05L
IPDYNTYKNT

SEQ ID NO: 22887 - protein, 13 aa, Severe acute respiratory syndrome coronavirus 2
  REGION 1..13: note = Table B: HLA-DQA1*01-B1*05L HLA-DQA1*05:01-B1*02:01L HLA-DPA1*01:03-B1*04:01L HLA-DRB1*15:03L
TTFTYASALWEIQ

SEQ ID NO: 22888 - protein, 13 aa, Severe acute respiratory syndrome coronavirus 2
  REGION 1..13: note = Table B: HLA-DQA1*01-B1*05L
YASALWEIQQVVD

SEQ ID NO: 22889 - protein, 16 aa, Severe acute respiratory syndrome coronavirus 2
  REGION 1..16: note = Table B: HLA-DQA1*01-B1*05L
VTALRANSAVKLQNNE

SEQ ID NO: 22890 - protein, 11 aa, Severe acute respiratory syndrome coronavirus 2
  REGION 1..11: note = Table B: HLA-DQA1*01-B1*05L HLA-DRB4*01:01L
NELSPVALRQM

SEQ ID NO: 22891 - protein, 12 aa, Severe acute respiratory syndrome coronavirus 2
  REGION 1..12: note = Table B: HLA-DQA1*01-B1*05L HLA-DQA1*05:01-B1*02:01L
TTQTACTDDNAL

SEQ ID NO: 22892 - protein, 10 aa, Severe acute respiratory syndrome coronavirus 2
  REGION 1..10: note = Table B: HLA-DQA1*01-B1*05L
ALAYYNTTKG

SEQ ID NO: 22893 - protein, 10 aa, Severe acute respiratory syndrome coronavirus 2
  REGION 1..10: note = Table B: HLA-DQA1*01-B1*05L
LAYYNTTKGG

SEQ ID NO: 22894 - protein, 10 aa, Severe acute respiratory syndrome coronavirus 2
  REGION 1..10: note = Table B: HLA-DQA1*01-B1*05L HLA-DQA1*01:03-B1*06:01L
DAAKAYKDYL

SEQ ID NO: 22895 - protein, 10 aa, Severe acute respiratory syndrome coronavirus 2
  REGION 1..10: note = Table B: HLA-DQA1*01-B1*05L
AKAYKDYLAS

SEQ ID NO: 22896 - protein, 10 aa, Severe acute respiratory syndrome coronavirus 2
  REGION 1..10: note = Table B: HLA-DQA1*01-B1*05L
KAYKDYLASG

SEQ ID NO: 22897 - protein, 12 aa, Severe acute respiratory syndrome coronavirus 2
  REGION 1..12: note = Table B: HLA-DQA1*01-B1*05L HLA-DQA1*03:01-B1*03:02L HLA-DQA1*02:01-B1*03:03L
AYKDYLASGGQP

SEQ ID NO: 22898 - protein, 10 aa, Severe acute respiratory syndrome coronavirus 2
  REGION 1..10: note = Table B: HLA-DQA1*01-B1*05L
AFDIYNDKVA

SEQ ID NO: 22899 - protein, 11 aa, Severe acute respiratory syndrome coronavirus 2
  REGION 1..11: note = Table B: HLA-DQA1*01-B1*05L
QEKDEDDNLID

SEQ ID NO: 22900 - protein, 11 aa, Severe acute respiratory syndrome coronavirus 2
  REGION 1..11: note = Table B: HLA-DQA1*01-B1*05L HLA-DPA1*01:02-B1*04:01L
DNLIDSYFVVK

SEQ ID NO: 22901 - protein, 10 aa, Severe acute respiratory syndrome coronavirus 2
  REGION 1..10: note = Table B: HLA-DQA1*01-B1*05L HLA-DQA1*03:01-B1*03:02L HLA-DQA1*01:03-B1*06:01L HLA-DQA1*02:01-B1*03:03L
TFSNYQHEET

SEQ ID NO: 22902 - protein, 12 aa, Severe acute respiratory syndrome coronavirus 2
  REGION 1..12: note = Table B: HLA-DQA1*01-B1*05L
HDFFKFRIDGDM

SEQ ID NO: 22903 - protein, 12 aa, Severe acute respiratory syndrome coronavirus 2
  REGION 1..12: note = Table B: HLA-DQA1*01-B1*05L HLA-DRB1*16:01L HLA-DRB1*15:03L
YALRHFDEGNCD

SEQ ID NO: 22904 - protein, 12 aa, Severe acute respiratory syndrome coronavirus 2
  REGION 1..12: note = Table B: HLA-DQA1*01-B1*05L
LRHFDEGNCDTL

SEQ ID NO: 22905 - protein, 13 aa, Severe acute respiratory syndrome coronavirus 2
  REGION 1..13: note = Table B: HLA-DQA1*01-B1*05L
KEILVTYNCCDDD

SEQ ID NO: 22906 - protein, 12 aa, Severe acute respiratory syndrome coronavirus 2
  REGION 1..12: note = Table B: HLA-DQA1*01-B1*05L
VTYNCCDDDYFN

SEQ ID NO: 22907 - protein, 12 aa, Severe acute respiratory syndrome coronavirus 2
  REGION 1..12: note = Table B: HLA-DQA1*01-B1*05L
YFNKKDWYDFVE

SEQ ID NO: 22908 - protein, 12 aa, Severe acute respiratory syndrome coronavirus 2
  REGION 1..12: note = Table B: HLA-DQA1*01-B1*05L
FNKKDWYDFVEN

SEQ ID NO: 22909 - protein, 12 aa, Severe acute respiratory syndrome coronavirus 2
  REGION 1..12: note = Table B: HLA-DQA1*01-B1*05L
NKKDWYDFVENP

SEQ ID NO: 22910 - protein, 10 aa, Severe acute respiratory syndrome coronavirus 2
  REGION 1..10: note = Table B: HLA-DQA1*01-B1*05L
DWYDFVENPD

SEQ ID NO: 22911 - protein, 13 aa, Severe acute respiratory syndrome coronavirus 2
  REGION 1..13: note = Table B: HLA-DQA1*01-B1*05L HLA-DQA1*01:03-B1*06:01L
DNQDLNGNWYDFG

SEQ ID NO: 22912 - protein, 13 aa, Severe acute respiratory syndrome coronavirus 2
  REGION 1..13: note = Table B: HLA-DQA1*01-B1*05L
NQDLNGNWYDFGD

SEQ ID NO: 22913 - protein, 12 aa, Severe acute respiratory syndrome coronavirus 2
  REGION 1..12: note = Table B: HLA-DQA1*01-B1*05L
DLNGNWYDFGDF

SEQ ID NO: 22914 - protein, 12 aa, Severe acute respiratory syndrome coronavirus 2
  REGION 1..12: note = Table B: HLA-DQA1*01-B1*05L
LNGNWYDFGDFI

SEQ ID NO: 22915 - protein, 10 aa, Severe acute respiratory syndrome coronavirus 2
  REGION 1..10: note = Table B: HLA-DQA1*01-B1*05L
NWYDFGDFIQ

SEQ ID NO: 22916 - protein, 13 aa, Severe acute respiratory syndrome coronavirus 2
  REGION 1..13: note = Table B: HLA-DQA1*01-B1*05L HLA-DRB1*15:03L
VPVVDSYYSLLMP

SEQ ID NO: 22917 - protein, 17 aa, Severe acute respiratory syndrome coronavirus 2
  REGION 1..17: note = Table B: HLA-DQA1*01-B1*05L HLA-DRB4*01:01L HLA-DRB1*09:01L
MPILTLTRALTAESHVD

SEQ ID NO: 22918 - protein, 10 aa, Severe acute respiratory syndrome coronavirus 2
  REGION 1..10: note = Table B: HLA-DQA1*01-B1*05L
AESHVDTDLT

SEQ ID NO: 22919 - protein, 13 aa, Severe acute respiratory syndrome coronavirus 2
  REGION 1..13: note = Table B: HLA-DQA1*01-B1*05L
IKWDLLKYDFTEE

SEQ ID NO: 22920 - protein, 10 aa, Severe acute respiratory syndrome coronavirus 2
  REGION 1..10: note = Table B: HLA-DQA1*01-B1*05L HLA-DQA1*03:01-B1*03:02L
LKYDFTEERL

SEQ ID NO: 22921 - protein, 10 aa, Severe acute respiratory syndrome coronavirus 2
  REGION 1..10: note = Table B: HLA-DQA1*01-B1*05L HLA-DPA1*03:01-B1*105:01L HLA-DQA1*03:01-B1*03:02L HLA-DPA1*01:02-B1*04:01L HLA-DRB1*16:01L HLA-DQA1*02:01-B1*03:03L
KYWDQTYHPN

SEQ ID NO: 22922 - protein, 13 aa, Severe acute respiratory syndrome coronavirus 2
  REGION 1..13: note = Table B: HLA-DQA1*01-B1*05L HLA-DRB1*16:01L
GPLVRKIFVDGVP

SEQ ID NO: 22923 - protein, 10 aa, Severe acute respiratory syndrome coronavirus 2
  REGION 1..10: note = Table B: HLA-DQA1*01-B1*05L
LLVYAADPAM

SEQ ID NO: 22924 - protein, 11 aa, Severe acute respiratory syndrome coronavirus 2
  REGION 1..11: note = Table B: HLA-DQA1*01-B1*05L
KPGNFNKDFYD

SEQ ID NO: 22925 - protein, 10 aa, Severe acute respiratory syndrome coronavirus 2
  REGION 1..10: note = Table B: HLA-DQA1*01-B1*05L
NKDFYDFAVS

SEQ ID NO: 22926 - protein, 10 aa, Severe acute respiratory syndrome coronavirus 2
  REGION 1..10: note = Table B: HLA-DQA1*01-B1*05L HLA-DQA1*03:01-B1*03:02L HLA-DQA1*02:01-B1*03:03L
DFYDFAVSKG

SEQ ID NO: 22927 - protein, 13 aa, Severe acute respiratory syndrome coronavirus 2
  REGION 1..13: note = Table B: HLA-DQA1*01-B1*05L HLA-DPA1*03:01-B1*105:01L
FAVSKGFFKEGSS

SEQ ID NO: 22928 - protein, 10 aa, Severe acute respiratory syndrome coronavirus 2
  REGION 1..10: note = Table B: HLA-DQA1*01-B1*05L HLA-DQA1*03:01-B1*03:02L
GFFKEGSSVE

SEQ ID NO: 22929 - protein, 12 aa, Severe acute respiratory syndrome coronavirus 2
  REGION 1..12: note = Table B: HLA-DQA1*01-B1*05L
LKHFFFAQDGNA

SEQ ID NO: 22930 - protein, 12 aa, Severe acute respiratory syndrome coronavirus 2
  REGION 1..12: note = Table B: HLA-DQA1*01-B1*05L
DGNAAISDYDYY

SEQ ID NO: 22931 - protein, 11 aa, Severe acute respiratory syndrome coronavirus 2
  REGION 1..11: note = Table B: HLA-DQA1*01-B1*05L
NAAISDYDYYR

SEQ ID NO: 22932 - protein, 10 aa, Severe acute respiratory syndrome coronavirus 2
  REGION 1..10: note = Table B: HLA-DQA1*01-B1*05L
ISDYDYYRYN

SEQ ID NO: 22933 - protein, 12 aa, Severe acute respiratory syndrome coronavirus 2
  REGION 1..12: note = Table B: HLA-DQA1*01-B1*05L
SDYDYYRYNLPT

SEQ ID NO: 22934 - protein, 12 aa, Severe acute respiratory syndrome coronavirus 2
  REGION 1..12: note = Table B: HLA-DQA1*01-B1*05L HLA-DPA1*03:01-B1*105:01L HLA-DPA1*01:02-B1*04:01L
VVDKYFDCYDGG

SEQ ID NO: 22935 - protein, 12 aa, Severe acute respiratory syndrome coronavirus 2
  REGION 1..12: note = Table B: HLA-DQA1*01-B1*05L
WGKARLYYDSMS

SEQ ID NO: 22936 - protein, 11 aa, Severe acute respiratory syndrome coronavirus 2
  REGION 1..11: note = Table B: HLA-DQA1*01-B1*05L
ARLYYDSMSYE

SEQ ID NO: 22937 - protein, 11 aa, Severe acute respiratory syndrome coronavirus 2
  REGION 1..11: note = Table B: HLA-DQA1*01-B1*05L
RLYYDSMSYED

SEQ ID NO: 22938 - protein, 11 aa, Severe acute respiratory syndrome coronavirus 2
  REGION 1..11: note = Table B: HLA-DQA1*01-B1*05L
LYYDSMSYEDQ

SEQ ID NO: 22939 - protein, 11 aa, Severe acute respiratory syndrome coronavirus 2
  REGION 1..11: note = Table B: HLA-DQA1*01-B1*05L
YYDSMSYEDQD

SEQ ID NO: 22940 - protein, 10 aa, Severe acute respiratory syndrome coronavirus 2
  REGION 1..10: note = Table B: HLA-DQA1*01-B1*05L
DSMSYEDQDA

SEQ ID NO: 22941 - protein, 10 aa, Severe acute respiratory syndrome coronavirus 2
  REGION 1..10: note = Table B: HLA-DQA1*01-B1*05L
SYEDQDALFA

SEQ ID NO: 22942 - protein, 16 aa, Severe acute respiratory syndrome coronavirus 2
  REGION 1..16: note = Table B: HLA-DQA1*01-B1*05L
DQDALFAYTKRNVIPT

SEQ ID NO: 22943 - protein, 16 aa, Severe acute respiratory syndrome coronavirus 2
  REGION 1..16: note = Table B: HLA-DQA1*01-B1*05L
DALFAYTKRNVIPTIT

SEQ ID NO: 22944 - protein, 13 aa, Severe acute respiratory syndrome coronavirus 2
  REGION 1..13: note = Table B: HLA-DQA1*01-B1*05L HLA-DRB1*16:01L HLA-DRB1*15:03L
IGTSKFYGGWHNM

SEQ ID NO: 22945 - protein, 10 aa, Severe acute respiratory syndrome coronavirus 2
  REGION 1..10: note = Table B: HLA-DQA1*01-B1*05L
MLKTVYSDVE

SEQ ID NO: 22946 - protein, 10 aa, Severe acute respiratory syndrome coronavirus 2
  REGION 1..10: note = Table B: HLA-DQA1*01-B1*05L
KTVYSDVENP

SEQ ID NO: 22947 - protein, 10 aa, Severe acute respiratory syndrome coronavirus 2
  REGION 1..10: note = Table B: HLA-DQA1*01-B1*05L
SDVENPHLMG

SEQ ID NO: 22948 - protein, 12 aa, Severe acute respiratory syndrome coronavirus 2
  REGION 1..12: note = Table B: HLA-DQA1*01-B1*05L
GDATTAYANSVF

SEQ ID NO: 22949 - protein, 10 aa, Severe acute respiratory syndrome coronavirus 2
  REGION 1..10: note = Table B: HLA-DQA1*01-B1*05L
NRDVDTDFVN

SEQ ID NO: 22950 - protein, 10 aa, Severe acute respiratory syndrome coronavirus 2
  REGION 1..10: note = Table B: HLA-DQA1*01-B1*05L
RDVDTDFVNE

SEQ ID NO: 22951 - protein, 13 aa, Severe acute respiratory syndrome coronavirus 2
  REGION 1..13: note = Table B: HLA-DQA1*01-B1*05L HLA-DPA1*03:01-B1*105:01L
KHFSMMILSDDAV

SEQ ID NO: 22952 - protein, 13 aa, Severe acute respiratory syndrome coronavirus 2
  REGION 1..13: note = Table B: HLA-DQA1*01-B1*05L HLA-DQA1*05:01-B1*02:01L
HFSMMILSDDAVV

SEQ ID NO: 22953 - protein, 13 aa, Severe acute respiratory syndrome coronavirus 2
  REGION 1..13: note = Table B: HLA-DQA1*01-B1*05L HLA-DQA1*05:01-B1*02:01L
FNSTYASQGLVAS

SEQ ID NO: 22954 - protein, 10 aa, Severe acute respiratory syndrome coronavirus 2
  REGION 1..10: note = Table B: HLA-DQA1*01-B1*05L HLA-DRB1*16:01L HLA-DRB1*15:03L
VLYYQNNVFM

SEQ ID NO: 22955 - protein, 12 aa, Severe acute respiratory syndrome coronavirus 2
  REGION 1..12: note = Table B: HLA-DQA1*01-B1*05L
SEAKCWTETDLT

SEQ ID NO: 22956 - protein, 10 aa, Severe acute respiratory syndrome coronavirus 2
  REGION 1..10: note = Table B: HLA-DQA1*01-B1*05L
DYVYLPYPDP

SEQ ID NO: 22957 - protein, 10 aa, Severe acute respiratory syndrome coronavirus 2
  REGION 1..10: note = Table B: HLA-DQA1*01-B1*05L HLA-DQA1*01:03-B1*06:01L
AGCFVDDIVK

SEQ ID NO: 22958 - protein, 11 aa, Severe acute respiratory syndrome coronavirus 2
  REGION 1..11: note = Table B: HLA-DQA1*01-B1*05L HLA-DRB1*15:03L
MIERFVSLAID

SEQ ID NO: 22959 - protein, 13 aa, Severe acute respiratory syndrome coronavirus 2
  REGION 1..13: note = Table B: HLA-DQA1*01-B1*05L
RFVSLAIDAYPLT

SEQ ID NO: 22960 - protein, 10 aa, Severe acute respiratory syndrome coronavirus 2
  REGION 1..10: note = Table B: HLA-DQA1*01-B1*05L HLA-DQA1*03:01-B1*03:02L
PNQEYADVFH

SEQ ID NO: 22961 - protein, 11 aa, Severe acute respiratory syndrome coronavirus 2
  REGION 1..11: note = Table B: HLA-DQA1*01-B1*05L
NTSRYWEPEFY

SEQ ID NO: 22962 - protein, 10 aa, Severe acute respiratory syndrome coronavirus 2
  REGION 1..10: note = Table B: HLA-DQA1*01-B1*05L
SRYWEPEFYE

SEQ ID NO: 22963 - protein, 13 aa, Severe acute respiratory syndrome coronavirus 2
  REGION 1..13: note = Table B: HLA-DQA1*01-B1*05L
APGCDVTDVTQLY

SEQ ID NO: 22964 - protein, 12 aa, Severe acute respiratory syndrome coronavirus 2
  REGION 1..12: note = Table B: HLA-DQA1*01-B1*05L HLA-DQA1*05:01-B1*02:01L
VGSDNVTDFNAI

SEQ ID NO: 22965 - protein, 12 aa, Severe acute respiratory syndrome coronavirus 2
  REGION 1..12: note = Table B: HLA-DQA1*01-B1*05L HLA-DQA1*05:01-B1*02:01L
GSDNVTDFNAIA

SEQ ID NO: 22966 - protein, 11 aa, Severe acute respiratory syndrome coronavirus 2
  REGION 1..11: note = Table B: HLA-DQA1*01-B1*05L
DNVTDFNAIAT

SEQ ID NO: 22967 - protein, 13 aa, Severe acute respiratory syndrome coronavirus 2
  REGION 1..13: note = Table B: HLA-DQA1*01-B1*05L HLA-DQA1*05:05-B1*03:19L HLA-DQA1*05:01-B1*02:01L
AIATCDWTNAGDY

SEQ ID NO: 22968 - protein, 11 aa, Severe acute respiratory syndrome coronavirus 2
  REGION 1..11: note = Table B: HLA-DQA1*01-B1*05L
ERLKLFAAETL

SEQ ID NO: 22969 - protein, 11 aa, Severe acute respiratory syndrome coronavirus 2
  REGION 1..11: note = Table B: HLA-DQA1*01-B1*05L HLA-DQA1*05:01-B1*02:01L HLA-DQA1*01:03-B1*06:01L
AAETLKATEET

SEQ ID NO: 22970 - protein, 10 aa, Severe acute respiratory syndrome coronavirus 2
  REGION 1..10: note = Table B: HLA-DQA1*01-B1*05L
VREVLSDREL

SEQ ID NO: 22971 - protein, 10 aa, Severe acute respiratory syndrome coronavirus 2
  REGION 1..10: note = Table B: HLA-DQA1*01-B1*05L HLA-DQA1*03:01-B1*03:02L
EYTFEKGDYG

SEQ ID NO: 22972 - protein, 10 aa, Severe acute respiratory syndrome coronavirus 2
  REGION 1..10: note = Table B: HLA-DQA1*01-B1*05L
TFEKGDYGDA

SEQ ID NO: 22973 - protein, 11 aa, Severe acute respiratory syndrome coronavirus 2
  REGION 1..11: note = Table B: HLA-DQA1*01-B1*05L HLA-DQA1*05:01-B1*02:01L
FEKGDYGDAVV

SEQ ID NO: 22974 - protein, 11 aa, Severe acute respiratory syndrome coronavirus 2
  REGION 1..11: note = Table B: HLA-DQA1*01-B1*05L HLA-DPA1*03:01-B1*105:01L HLA-DQA1*03:01-B1*03:02L HLA-DQA1*01:03-B1*06:01L
VGDYFVLTSHT

SEQ ID NO: 22975 - protein, 12 aa, Severe acute respiratory syndrome coronavirus 2
  REGION 1..12: note = Table B: HLA-DQA1*01-B1*05L HLA-DRB1*15:03L
IGLALYYPSARI

SEQ ID NO: 22976 - protein, 14 aa, Severe acute respiratory syndrome coronavirus 2
  REGION 1..14: note = Table B: HLA-DQA1*01-B1*05L HLA-DRB1*16:01L
VNSTLEQYVFCTVN

SEQ ID NO: 22977 - protein, 10 aa, Severe acute respiratory syndrome coronavirus 2
  REGION 1..10: note = Table B: HLA-DQA1*01-B1*05L HLA-DQA1*05:01-B1*02:01L HLA-DRB1*15:03L
DIVVFDEISM

SEQ ID NO: 22978 - protein, 10 aa, Severe acute respiratory syndrome coronavirus 2
  REGION 1..10: note = Table B: HLA-DQA1*01-B1*05L HLA-DRB1*15:03L
IVVFDEISMA

SEQ ID NO: 22979 - protein, 12 aa, Severe acute respiratory syndrome coronavirus 2
  REGION 1..12: note = Table B: HLA-DQA1*01-B1*05L HLA-DRB1*15:03L
ISMATNYDLSVV

SEQ ID NO: 22980 - protein, 12 aa, Severe acute respiratory syndrome coronavirus 2
  REGION 1..12: note = Table B: HLA-DQA1*01-B1*05L HLA-DQA1*05:01-B1*02:01L HLA-DQA1*03:01-B1*03:02L
SMATNYDLSVVN

SEQ ID NO: 22981 - protein, 11 aa, Severe acute respiratory syndrome coronavirus 2
  REGION 1..11: note = Table B: HLA-DQA1*01-B1*05L HLA-DQA1*01:03-B1*06:01L
TKGTLEPEYFN

SEQ ID NO: 22982 - protein, 13 aa, Severe acute respiratory syndrome coronavirus 2
  REGION 1..13: note = Table B: HLA-DQA1*01-B1*05L
VASKILGLPTQTV

SEQ ID NO: 22983 - protein, 12 aa, Severe acute respiratory syndrome coronavirus 2
  REGION 1..12: note = Table B: HLA-DQA1*01-B1*05L HLA-DQA1*01:03-B1*06:01L
VDSSQGSEYDYV

SEQ ID NO: 22984 - protein, 12 aa, Severe acute respiratory syndrome coronavirus 2
  REGION 1..12: note = Table B: HLA-DQA1*01-B1*05L
SQGSEYDYVIFT

SEQ ID NO: 22985 - protein, 12 aa, Severe acute respiratory syndrome coronavirus 2
  REGION 1..12: note = Table B: HLA-DQA1*01-B1*05L HLA-DPA1*01:03-B1*04:01L HLA-DPA1*01:03-B1*04:02L HLA-DPA1*03:01-B1*105:01L
SEYDYVIFTQTT

SEQ ID NO: 22986 - protein, 13 aa, Severe acute respiratory syndrome coronavirus 2
  REGION 1..13: note = Table B: HLA-DQA1*01-B1*05L HLA-DRB1*15:03L
VGILCIMSDRDLY

SEQ ID NO: 22987 - protein, 12 aa, Severe acute respiratory syndrome coronavirus 2
  REGION 1..12: note = Table B: HLA-DQA1*01-B1*05L HLA-DRB1*15:03L
ILCIMSDRDLYD

SEQ ID NO: 22988 - protein, 12 aa, Severe acute respiratory syndrome coronavirus 2
  REGION 1..12: note = Table B: HLA-DQA1*01-B1*05L
YDKLQFTSLEIP

SEQ ID NO: 22989 - protein, 10 aa, Severe acute respiratory syndrome coronavirus 2
  REGION 1..10: note = Table B: HLA-DQA1*01-B1*05L
VNGYPNMFIT

SEQ ID NO: 22990 - protein, 10 aa, Severe acute respiratory syndrome coronavirus 2
  REGION 1..10: note = Table B: HLA-DQA1*01-B1*05L HLA-DRB1*15:03L
VRAWIGFDVE

SEQ ID NO: 22991 - protein, 10 aa, Severe acute respiratory syndrome coronavirus 2
  REGION 1..10: note = Table B: HLA-DQA1*01-B1*05L
RAWIGFDVEG

SEQ ID NO: 22992 - protein, 10 aa, Severe acute respiratory syndrome coronavirus 2
  REGION 1..10: note = Table B: HLA-DQA1*01-B1*05L
VPTGYVDTPN

SEQ ID NO: 22993 - protein, 10 aa, Severe acute respiratory syndrome coronavirus 2
  REGION 1..10: note = Table B: HLA-DQA1*01-B1*05L
PTGYVDTPNN

SEQ ID NO: 22994 - protein, 11 aa, Severe acute respiratory syndrome coronavirus 2
  REGION 1..11: note = Table B: HLA-DQA1*01-B1*05L
IKIVQMLSDTL

SEQ ID NO: 22995 - protein, 12 aa, Severe acute respiratory syndrome coronavirus 2
  REGION 1..12: note = Table B: HLA-DQA1*01-B1*05L
HHSIGFDYVYNP

SEQ ID NO: 22996 - protein, 10 aa, Severe acute respiratory syndrome coronavirus 2
  REGION 1..10: note = Table B: HLA-DQA1*01-B1*05L
YNPFMIDVQQ

SEQ ID NO: 22997 - protein, 12 aa, Severe acute respiratory syndrome coronavirus 2
  REGION 1..12: note = Table B: HLA-DQA1*01-B1*05L HLA-DQA1*05:01-B1*02:01L HLA-DQA1*03:01-B1*03:02L
IDVQQWGFTGNL

SEQ ID NO: 22998 - protein, 11 aa, Severe acute respiratory syndrome coronavirus 2
  REGION 1..11: note = Table B: HLA-DQA1*01-B1*05L
VQQWGFTGNLQ

SEQ ID NO: 22999 - protein, 10 aa, Severe acute respiratory syndrome coronavirus 2
  REGION 1..10: note = Table B: HLA-DQA1*01-B1*05L HLA-DQA1*03:01-B1*03:02L
EYPIIGDELK

SEQ ID NO: 23000 - protein, 13 aa, Severe acute respiratory syndrome coronavirus 2
  REGION 1..13: note = Table B: HLA-DQA1*01-B1*05L HLA-DQA1*03:01-B1*03:02L
ADKFPVLHDIGNP

SEQ ID NO: 23001 - protein, 11 aa, Severe acute respiratory syndrome coronavirus 2
  REGION 1..11: note = Table B: HLA-DQA1*01-B1*05L
VPQADVEWKFY

SEQ ID NO: 23002 - protein, 12 aa, Severe acute respiratory syndrome coronavirus 2
  REGION 1..12: note = Table B: HLA-DQA1*01-B1*05L
DVEWKFYDAQPC

SEQ ID NO: 23003 - protein, 12 aa, Severe acute respiratory syndrome coronavirus 2
  REGION 1..12: note = Table B: HLA-DQA1*01-B1*05L HLA-DPA1*01:02-B1*04:01L
KIEELFYSYATH

SEQ ID NO: 23004 - protein, 12 aa, Severe acute respiratory syndrome coronavirus 2
  REGION 1..12: note = Table B: HLA-DQA1*01-B1*05L
IEELFYSYATHS

SEQ ID NO: 23005 - protein, 11 aa, Severe acute respiratory syndrome coronavirus 2
  REGION 1..11: note = Table B: HLA-DQA1*01-B1*05L HLA-DQA1*03:01-B1*03:02L
ELFYSYATHSD

SEQ ID NO: 23006 - protein, 11 aa, Severe acute respiratory syndrome coronavirus 2
  REGION 1..11: note = Table B: HLA-DQA1*01-B1*05L HLA-DQA1*03:01-B1*03:02L
YSYATHSDKFT

SEQ ID NO: 23007 - protein, 10 aa, Severe acute respiratory syndrome coronavirus 2
  REGION 1..10: note = Table B: HLA-DQA1*01-B1*05L HLA-DRB1*16:01L
FHTPAFDKSA

SEQ ID NO: 23008 - protein, 10 aa, Severe acute respiratory syndrome coronavirus 2
  REGION 1..10: note = Table B: HLA-DQA1*01-B1*05L
TPAFDKSAFV

SEQ ID NO: 23009 - protein, 13 aa, Severe acute respiratory syndrome coronavirus 2
  REGION 1..13: note = Table B: HLA-DQA1*01-B1*05L
KQLPFFYYSDSPC

SEQ ID NO: 23010 - protein, 11 aa, Severe acute respiratory syndrome coronavirus 2
  REGION 1..11: note = Table B: HLA-DQA1*01-B1*05L
PFFYYSDSPCE

SEQ ID NO: 23011 - protein, 12 aa, Severe acute respiratory syndrome coronavirus 2
  REGION 1..12: note = Table B: HLA-DQA1*01-B1*05L
GKQVVSDIDYVP

SEQ ID NO: 23012 - protein, 10 aa, Severe acute respiratory syndrome coronavirus 2
  REGION 1..10: note = Table B: HLA-DQA1*01-B1*05L
EYRLYLDAYN

SEQ ID NO: 23013 - protein, 10 aa, Severe acute respiratory syndrome coronavirus 2
  REGION 1..10: note = Table B: HLA-DQA1*01-B1*05L
YRLYLDAYNM

SEQ ID NO: 23014 - protein, 11 aa, Severe acute respiratory syndrome coronavirus 2
  REGION 1..11: note = Table B: HLA-DQA1*01-B1*05L HLA-DPA1*01:02-B1*04:01L
FSLWVYKQFDT

SEQ ID NO: 23015 - protein, 10 aa, Severe acute respiratory syndrome coronavirus 2
  REGION 1..10: note = Table B: HLA-DQA1*01-B1*05L HLA-DPA1*02:01-B1*13:01L HLA-DPA1*01:02-B1*04:01L HLA-DRB1*16:01L HLA-DQA1*01:03-B1*06:01L HLA-DQA1*02:01-B1*03:03L HLA-DRB1*15:03L
VYKQFDTYNL

SEQ ID NO: 23016 - protein, 11 aa, Severe acute respiratory syndrome coronavirus 2
  REGION 1..11: note = Table B: HLA-DQA1*01-B1*05L HLA-DRB1*16:01L
YKQFDTYNLWN

SEQ ID NO: 23017 - protein, 11 aa, Severe acute respiratory syndrome coronavirus 2
  REGION 1..11: note = Table B: HLA-DQA1*01-B1*05L
KQFDTYNLWNT

SEQ ID NO: 23018 - protein, 11 aa, Severe acute respiratory syndrome coronavirus 2
  REGION 1..11: note = Table B: HLA-DQA1*01-B1*05L HLA-DPA1*01:02-B1*04:01L
GVDVELFENKT

SEQ ID NO: 23019 - protein, 10 aa, Severe acute respiratory syndrome coronavirus 2
  REGION 1..10: note = Table B: HLA-DQA1*01-B1*05L
DVELFENKTT

SEQ ID NO: 23020 - protein, 11 aa, Severe acute respiratory syndrome coronavirus 2
  REGION 1..11: note = Table B: HLA-DQA1*01-B1*05L
APLTVFFDGRV

SEQ ID NO: 23021 - protein, 10 aa, Severe acute respiratory syndrome coronavirus 2
  REGION 1..10: note = Table B: HLA-DQA1*01-B1*05L
LTVFFDGRVD

SEQ ID NO: 23022 - protein, 10 aa, Severe acute respiratory syndrome coronavirus 2
  REGION 1..10: note = Table B: HLA-DQA1*01-B1*05L HLA-DQA1*03:01-B1*03:02L
TVFFDGRVDG

SEQ ID NO: 23023 - protein, 10 aa, Severe acute respiratory syndrome coronavirus 2
  REGION 1..10: note = Table B: HLA-DQA1*01-B1*05L
VFFDGRVDGQ

SEQ ID NO: 23024 - protein, 10 aa, Severe acute respiratory syndrome coronavirus 2
  REGION 1..10: note = Table B: HLA-DQA1*01-B1*05L HLA-DQA1*03:01-B1*03:02L
DGRVDGQVDL

SEQ ID NO: 23025 - protein, 11 aa, Severe acute respiratory syndrome coronavirus 2
  REGION 1..11: note = Table B: HLA-DQA1*01-B1*05L HLA-DQA1*03:01-B1*03:02L HLA-DQA1*02:01-B1*03:03L
LPETYFTQSRN

SEQ ID NO: 23026 - protein, 11 aa, Severe acute respiratory syndrome coronavirus 2
  REGION 1..11: note = Table B: HLA-DQA1*01-B1*05L
KPRSQMEIDFL

SEQ ID NO: 23027 - protein, 14 aa, Severe acute respiratory syndrome coronavirus 2
  REGION 1..14: note = Table B: HLA-DQA1*01-B1*05L HLA-DQA1*05:01-B1*02:01L HLA-DPA1*03:01-B1*105:01L
SQMEIDFLELAMDE

SEQ ID NO: 23028 - protein, 11 aa, Severe acute respiratory syndrome coronavirus 2
  REGION 1..11: note = Table B: HLA-DQA1*01-B1*05L
FEHIVYGDFSH

SEQ ID NO: 23029 - protein, 11 aa, Severe acute respiratory syndrome coronavirus 2
  REGION 1..11: note = Table B: HLA-DQA1*01-B1*05L HLA-DPA1*01:02-B1*04:01L
EHIVYGDFSHS

SEQ ID NO: 23030 - protein, 11 aa, Severe acute respiratory syndrome coronavirus 2
  REGION 1..11: note = Table B: HLA-DQA1*01-B1*05L HLA-DPA1*01:03-B1*04:02L HLA-DRB1*16:01L HLA-DQA1*01:03-B1*06:01L HLA-DRB1*04:08L
PFELEDFIPMD

SEQ ID NO: 23031 - protein, 11 aa, Severe acute respiratory syndrome coronavirus 2
  REGION 1..11: note = Table B: HLA-DQA1*01-B1*05L
ELEDFIPMDST

SEQ ID NO: 23032 - protein, 12 aa, Severe acute respiratory syndrome coronavirus 2
  REGION 1..12: note = Table B: HLA-DQA1*01-B1*05L HLA-DQA1*03:01-B1*03:02L HLA-DQA1*01:03-B1*06:01L HLA-DQA1*02:01-B1*03:03L
STVKNYFITDAQ

SEQ ID NO: 23033 - protein, 12 aa, Severe acute respiratory syndrome coronavirus 2
  REGION 1..12: note = Table B: HLA-DQA1*01-B1*05L
TVKNYFITDAQT

SEQ ID NO: 23034 - protein, 10 aa, Severe acute respiratory syndrome coronavirus 2
  REGION 1..10: note = Table B: HLA-DQA1*01-B1*05L
NYFITDAQTG

SEQ ID NO: 23035 - protein, 11 aa, Severe acute respiratory syndrome coronavirus 2
  REGION 1..11: note = Table B: HLA-DQA1*01-B1*05L
VIDLLLDDFVE

SEQ ID NO: 23036 - protein, 11 aa, Severe acute respiratory syndrome coronavirus 2
  REGION 1..11: note = Table B: HLA-DQA1*01-B1*05L HLA-DPA1*01:02-B1*04:01L
GHVETFYPKLQ

SEQ ID NO: 23037 - protein, 10 aa, Severe acute respiratory syndrome coronavirus 2
  REGION 1..10: note = Table B: HLA-DQA1*01-B1*05L
DLQNYGDSAT

SEQ ID NO: 23038 - protein, 10 aa, Severe acute respiratory syndrome coronavirus 2
  REGION 1..10: note = Table B: HLA-DQA1*01-B1*05L
LQNYGDSATL

SEQ ID NO: 23039 - protein, 10 aa, Severe acute respiratory syndrome coronavirus 2
  REGION 1..10: note = Table B: HLA-DQA1*01-B1*05L
LRQWLPTGTL

SEQ ID NO: 23040 - protein, 12 aa, Severe acute respiratory syndrome coronavirus 2
  REGION 1..12: note = Table B: HLA-DQA1*01-B1*05L HLA-DQA1*05:01-B1*02:01L
LVDSDLNDFVSD

SEQ ID NO: 23041 - protein, 11 aa, Severe acute respiratory syndrome coronavirus 2
  REGION 1..11: note = Table B: HLA-DQA1*01-B1*05L
SDLNDFVSDAD

SEQ ID NO: 23042 - protein, 11 aa, Severe acute respiratory syndrome coronavirus 2
  REGION 1..11: note = Table B: HLA-DQA1*01-B1*05L
DLNDFVSDADS

SEQ ID NO: 23043 - protein, 11 aa, Severe acute respiratory syndrome coronavirus 2
  REGION 1..11: note = Table B: HLA-DQA1*01-B1*05L
LNDFVSDADST

SEQ ID NO: 23044 - protein, 12 aa, Severe acute respiratory syndrome coronavirus 2
  REGION 1..12: note = Table B: HLA-DQA1*01-B1*05L
TANKWDLIISDM

SEQ ID NO: 23045 - protein, 10 aa, Severe acute respiratory syndrome coronavirus 2
  REGION 1..10: note = Table B: HLA-DQA1*01-B1*05L HLA-DPA1*01:03-B1*04:02L HLA-DPA1*03:01-B1*105:01L HLA-DQA1*03:01-B1*03:02L HLA-DPA1*01:02-B1*04:01L HLA-DQA1*01:03-B1*06:01L HLA-DQA1*02:01-B1*03:03L
SSYSLFDMSK

SEQ ID NO: 23046 - protein, 12 aa, Severe acute respiratory syndrome coronavirus 2
  REGION 1..12: note = Table B: HLA-DQA1*01-B1*05L
SYSLFDMSKFPL

SEQ ID NO: 23047 - protein, 12 aa, Severe acute respiratory syndrome coronavirus 2
  REGION 1..12: note = Table B: HLA-DQA1*01-B1*05L HLA-DPA1*01:03-B1*04:02L HLA-DPA1*02:01-B1*13:01L
YSLFDMSKFPLK

SEQ ID NO: 23048 - protein, 12 aa, Severe acute respiratory syndrome coronavirus 2
  REGION 1..12: note = Table B: HLA-DQA1*01-B1*05L
FTRGVYYPDKVF

SEQ ID NO: 23049 - protein, 10 aa, Severe acute respiratory syndrome coronavirus 2
  REGION 1..10: note = Table B: HLA-DQA1*01-B1*05L
VYYPDKVFRS

SEQ ID NO: 23050 - protein, 11 aa, Severe acute respiratory syndrome coronavirus 2
  REGION 1..11: note = Table B: HLA-DQA1*01-B1*05L
VLHSTQDLFLP

SEQ ID NO: 23051 - protein, 12 aa, Severe acute respiratory syndrome coronavirus 2
  REGION 1..12: note = Table B: HLA-DQA1*01-B1*05L
STQDLFLPFFSN

SEQ ID NO: 23052 - protein, 11 aa, Severe acute respiratory syndrome coronavirus 2
  REGION 1..11: note = Table B: HLA-DQA1*01-B1*05L
DLFLPFFSNVT

SEQ ID NO: 23053 - protein, 10 aa, Severe acute respiratory syndrome coronavirus 2
  REGION 1..10: note = Table B: HLA-DQA1*01-B1*05L HLA-DRB1*16:01L HLA-DRB1*15:03L
VTWFHAIHVS

SEQ ID NO: 23054 - protein, 12 aa, Severe acute respiratory syndrome coronavirus 2
  REGION 1..12: note = Table B: HLA-DQA1*01-B1*05L
NGTKRFDNPVLP

SEQ ID NO: 23055 - protein, 12 aa, Severe acute respiratory syndrome coronavirus 2
  REGION 1..12: note = Table B: HLA-DQA1*01-B1*05L
TKRFDNPVLPFN

SEQ ID NO: 23056 - protein, 10 aa, Severe acute respiratory syndrome coronavirus 2
  REGION 1..10: note = Table B: HLA-DQA1*01-B1*05L
EFQFCNDPFL

SEQ ID NO: 23057 - protein, 13 aa, Severe acute respiratory syndrome coronavirus 2
  REGION 1..13: note = Table B: HLA-DQA1*01-B1*05L HLA-DPA1*02:01-B1*13:01L
YHKNNKSWMESEF

SEQ ID NO: 23058 - protein, 10 aa, Severe acute respiratory syndrome coronavirus 2
  REGION 1..10: note = Table B: HLA-DQA1*01-B1*05L
NKSWMESEFR

SEQ ID NO: 23059 - protein, 11 aa, Severe acute respiratory syndrome coronavirus 2
  REGION 1..11: note = Table B: HLA-DQA1*01-B1*05L
VSQPFLMDLEG

SEQ ID NO: 23060 - protein, 11 aa, Severe acute respiratory syndrome coronavirus 2
  REGION 1..11: note = Table B: HLA-DQA1*01-B1*05L
LREFVFKNIDG

SEQ ID NO: 23061 - protein, 12 aa, Severe acute respiratory syndrome coronavirus 2
  REGION 1..12: note = Table B: HLA-DQA1*01-B1*05L HLA-DQA1*03:01-B1*03:02L
DLPQGFSALEPL

SEQ ID NO: 23062 - protein, 13 aa, Severe acute respiratory syndrome coronavirus 2
  REGION 1..13: note = Table B: HLA-DQA1*01-B1*05L
GFSALEPLVDLPI

SEQ ID NO: 23063 - protein, 12 aa, Severe acute respiratory syndrome coronavirus 2
  REGION 1..12: note = Table B: HLA-DQA1*01-B1*05L
GAAAYYVGYLQP

SEQ ID NO: 23064 - protein, 13 aa, Severe acute respiratory syndrome coronavirus 2
  REGION 1..13: note = Table B: HLA-DQA1*01-B1*05L HLA-DQA1*05:01-B1*02:01L
ITDAVDCALDPLS

SEQ ID NO: 23065 - protein, 10 aa, Severe acute respiratory syndrome coronavirus 2
  REGION 1..10: note = Table B: HLA-DQA1*01-B1*05L HLA-DQA1*01:03-B1*06:01L
ESIVRFPNIT

SEQ ID NO: 23066 - protein, 11 aa, Severe acute respiratory syndrome coronavirus 2
  REGION 1..11: note = Table B: HLA-DQA1*01-B1*05L
ATRFASVYAWN

SEQ ID NO: 23067 - protein, 10 aa, Severe acute respiratory syndrome coronavirus 2
  REGION 1..10: note = Table B: HLA-DQA1*01-B1*05L
FTNVYADSFV

SEQ ID NO: 23068 - protein, 10 aa, Severe acute respiratory syndrome coronavirus 2
  REGION 1..10: note = Table B: HLA-DQA1*01-B1*05L
VYADSFVIRG

SEQ ID NO: 23069 - protein, 10 aa, Severe acute respiratory syndrome coronavirus 2
  REGION 1..10: note = Table B: HLA-DQA1*01-B1*05L
YNYKLPDDFT

SEQ ID NO: 23070 - protein, 12 aa, Severe acute respiratory syndrome coronavirus 2
  REGION 1..12: note = Table B: HLA-DQA1*01-B1*05L HLA-DQA1*05:01-B1*02:01L
AWNSNNLDSKVG

SEQ ID NO: 23071 - protein, 14 aa, Severe acute respiratory syndrome coronavirus 2
  REGION 1..14: note = Table B: HLA-DQA1*01-B1*05L
QPTNGVGYQPYRVV

SEQ ID NO: 23072 - protein, 10 aa, Severe acute respiratory syndrome coronavirus 2
  REGION 1..10: note = Table B: HLA-DQA1*01-B1*05L
YQPYRVVVLS

SEQ ID NO: 23073 - protein, 13 aa, Severe acute respiratory syndrome coronavirus 2
  REGION 1..13: note = Table B: HLA-DQA1*01-B1*05L
FNFNGLTGTGVLT

SEQ ID NO: 23074 - protein, 10 aa, Severe acute respiratory syndrome coronavirus 2
  REGION 1..10: note = Table B: HLA-DQA1*01-B1*05L HLA-DPA1*01:02-B1*04:01L
FLPFQQFGRD

SEQ ID NO: 23075 - protein, 10 aa, Severe acute respiratory syndrome coronavirus 2
  REGION 1..10: note = Table B: HLA-DQA1*01-B1*05L
LPFQQFGRDI

SEQ ID NO: 23076 - protein, 12 aa, Severe acute respiratory syndrome coronavirus 2
  REGION 1..12: note = Table B: HLA-DQA1*01-B1*05L HLA-DQA1*03:01-B1*03:02L
QQFGRDIADTTD

SEQ ID NO: 23077 - protein, 10 aa, Severe acute respiratory syndrome coronavirus 2
  REGION 1..10: note = Table B: HLA-DQA1*01-B1*05L
GRDIADTTDA

SEQ ID NO: 23078 - protein, 10 aa, Severe acute respiratory syndrome coronavirus 2
  REGION 1..10: note = Table B: HLA-DQA1*01-B1*05L HLA-DQA1*03:01-B1*03:02L HLA-DQA1*02:01-B1*03:03L
DAVRDPQTLE

SEQ ID NO: 23079 - protein, 11 aa, Severe acute respiratory syndrome coronavirus 2
  REGION 1..11: note = Table B: HLA-DQA1*01-B1*05L
AVRDPQTLEIL

SEQ ID NO: 23080 - protein, 12 aa, Severe acute respiratory syndrome coronavirus 2
  REGION 1..12: note = Table B: HLA-DQA1*01-B1*05L
LTGIAVEQDKNT

SEQ ID NO: 23081 - protein, 11 aa, Severe acute respiratory syndrome coronavirus 2
  REGION 1..11: note = Table B: HLA-DQA1*01-B1*05L
PSKRSFIEDLL

SEQ ID NO: 23082 - protein, 10 aa, Severe acute respiratory syndrome coronavirus 2
  REGION 1..10: note = Table B: HLA-DQA1*01-B1*05L
RSFIEDLLFN

SEQ ID NO: 23083 - protein, 11 aa, Severe acute respiratory syndrome coronavirus 2
  REGION 1..11: note = Table B: HLA-DQA1*01-B1*05L HLA-DRB1*15:03L
VTLADAGFIKQ

SEQ ID NO: 23084 - protein, 12 aa, Severe acute respiratory syndrome coronavirus 2
  REGION 1..12: note = Table B: HLA-DQA1*01-B1*05L HLA-DRB1*16:01L HLA-DRB1*15:03L
FIKQYGDCLGDI

SEQ ID NO: 23085 - protein, 12 aa, Severe acute respiratory syndrome coronavirus 2
  REGION 1..12: note = Table B: HLA-DQA1*01-B1*05L HLA-DQA1*05:01-B1*02:01L HLA-DQA1*03:01-B1*03:02L
LPPLLTDEMIAQ

SEQ ID NO: 23086 - protein, 11 aa, Severe acute respiratory syndrome coronavirus 2
  REGION 1..11: note = Table B: HLA-DQA1*01-B1*05L HLA-DRB1*15:03L
EMIAQYTSALL

SEQ ID NO: 23087 - protein, 12 aa, Severe acute respiratory syndrome coronavirus 2
  REGION 1..12: note = Table B: HLA-DQA1*01-B1*05L
QMAYRFNGIGVT

SEQ ID NO: 23088 - protein, 10 aa, Severe acute respiratory syndrome coronavirus 2
  REGION 1..10: note = Table B: HLA-DQA1*01-B1*05L
QNVLYENQKL

SEQ ID NO: 23089 - protein, 13 aa, Severe acute respiratory syndrome coronavirus 2
  REGION 1..13: note = Table B: HLA-DQA1*01-B1*05L HLA-DRB1*15:03L
SNFGAISSVLNDI

SEQ ID NO: 23090 - protein, 12 aa, Severe acute respiratory syndrome coronavirus 2
  REGION 1..12: note = Table B: HLA-DQA1*01-B1*05L
ISSVLNDILSRL

SEQ ID NO: 23091 - protein, 11 aa, Severe acute respiratory syndrome coronavirus 2
  REGION 1..11: note = Table B: HLA-DQA1*01-B1*05L
TQRNFYEPQII

SEQ ID NO: 23092 - protein, 10 aa, Severe acute respiratory syndrome coronavirus 2
  REGION 1..10: note = Table B: HLA-DQA1*01-B1*05L
RNFYEPQIIT

SEQ ID NO: 23093 - protein, 11 aa, Severe acute respiratory syndrome coronavirus 2
  REGION 1..11: note = Table B: HLA-DQA1*01-B1*05L
NFYEPQIITTD

SEQ ID NO: 23094 - protein, 12 aa, Severe acute respiratory syndrome coronavirus 2
  REGION 1..12: note = Table B: HLA-DQA1*01-B1*05L
GIVNNTVYDPLQ

SEQ ID NO: 23095 - protein, 10 aa, Severe acute respiratory syndrome coronavirus 2
  REGION 1..10: note = Table B: HLA-DQA1*01-B1*05L HLA-DQA1*03:01-B1*03:02L
YDPLQPELDS

SEQ ID NO: 23096 - protein, 11 aa, Severe acute respiratory syndrome coronavirus 2
  REGION 1..11: note = Table B: HLA-DQA1*01-B1*05L HLA-DQA1*03:01-B1*03:02L HLA-DQA1*02:01-B1*03:03L
DPLQPELDSFK

SEQ ID NO: 23097 - protein, 11 aa, Severe acute respiratory syndrome coronavirus 2
  REGION 1..11: note = Table B: HLA-DQA1*01-B1*05L
QPELDSFKEEL

SEQ ID NO: 23098 - protein, 10 aa, Severe acute respiratory syndrome coronavirus 2
  REGION 1..10: note = Table B: HLA-DQA1*01-B1*05L
ELDSFKEELD

SEQ ID NO: 23099 - protein, 11 aa, Severe acute respiratory syndrome coronavirus 2
  REGION 1..11: note = Table B: HLA-DQA1*01-B1*05L
FKNHTSPDVDL

SEQ ID NO: 23100 - protein, 10 aa, Severe acute respiratory syndrome coronavirus 2
  REGION 1..10: note = Table B: HLA-DQA1*01-B1*05L
NHTSPDVDLG

SEQ ID NO: 23101 - protein, 12 aa, Severe acute respiratory syndrome coronavirus 2
  REGION 1..12: note = Table B: HLA-DQA1*01-B1*05L HLA-DQA1*05:01-B1*02:01L HLA-DQA1*03:01-B1*03:02L
TSPDVDLGDISG

SEQ ID NO: 23102 - protein, 12 aa, Severe acute respiratory syndrome coronavirus 2
  REGION 1..12: note = Table B: HLA-DQA1*01-B1*05L HLA-DQA1*05:01-B1*02:01L HLA-DPA1*02:01-B1*13:01L HLA-DPA1*03:01-B1*105:01L HLA-DRB1*15:03L
VVNIQKEIDRLN

SEQ ID NO: 23103 - protein, 11 aa, Severe acute respiratory syndrome coronavirus 2
  REGION 1..11: note = Table B: HLA-DQA1*01-B1*05L
KNLNESLIDLQ

SEQ ID NO: 23104 - protein, 11 aa, Severe acute respiratory syndrome coronavirus 2
  REGION 1..11: note = Table B: HLA-DQA1*01-B1*05L
NLNESLIDLQE

SEQ ID NO: 23105 - protein, 11 aa, Severe acute respiratory syndrome coronavirus 2
  REGION 1..11: note = Table B: HLA-DQA1*01-B1*05L
LNESLIDLQEL

SEQ ID NO: 23106 - protein, 11 aa, Severe acute respiratory syndrome coronavirus 2
  REGION 1..11: note = Table B: HLA-DQA1*01-B1*05L HLA-DQA1*05:01-B1*02:01L
NESLIDLQELG

SEQ ID NO: 23107 - protein, 10 aa, Severe acute respiratory syndrome coronavirus 2
  REGION 1..10: note = Table B: HLA-DQA1*01-B1*05L
KFDEDDSEPV

SEQ ID NO: 23108 - protein, 11 aa, Severe acute respiratory syndrome coronavirus 2
  REGION 1..11: note = Table B: HLA-DQA1*01-B1*05L
KNPLLYDANYF

SEQ ID NO: 23109 - protein, 12 aa, Severe acute respiratory syndrome coronavirus 2
  REGION 1..12: note = Table B: HLA-DQA1*01-B1*05L
DYCIPYNSVTSS

SEQ ID NO: 23110 - protein, 11 aa, Severe acute respiratory syndrome coronavirus 2
  REGION 1..11: note = Table B: HLA-DQA1*01-B1*05L HLA-DQA1*05:01-B1*02:01L HLA-DQA1*03:01-B1*03:02L
SPISEHDYQIG

SEQ ID NO: 23111 - protein, 10 aa, Severe acute respiratory syndrome coronavirus 2
  REGION 1..10: note = Table B: HLA-DQA1*01-B1*05L
QIGGYTEKWE

SEQ ID NO: 23112 - protein, 11 aa, Severe acute respiratory syndrome coronavirus 2
  REGION 1..11: note = Table B: HLA-DQA1*01-B1*05L HLA-DQA1*02:01-B1*03:03L
YTEKWESGVKD

SEQ ID NO: 23113 - protein, 10 aa, Severe acute respiratory syndrome coronavirus 2
  REGION 1..10: note = Table B: HLA-DQA1*01-B1*05L
HSYFTSDYYQ

SEQ ID NO: 23114 - protein, 10 aa, Severe acute respiratory syndrome coronavirus 2
  REGION 1..10: note = Table B: HLA-DQA1*01-B1*05L
EPIYDEPTTT

SEQ ID NO: 23115 - protein, 12 aa, Severe acute respiratory syndrome coronavirus 2
  REGION 1..12: note = Table B: HLA-DQA1*01-B1*05L HLA-DRB1*16:01L HLA-DQA1*01:03-B1*06:01L HLA-DQA1*02:01-B1*03:03L
ADSNGTITVEEL

SEQ ID NO: 23116 - protein, 11 aa, Severe acute respiratory syndrome coronavirus 2
  REGION 1..11: note = Table B: HLA-DQA1*01-B1*05L
KLLEQWNLVIG

SEQ ID NO: 23117 - protein, 10 aa, Severe acute respiratory syndrome coronavirus 2
  REGION 1..10: note = Table B: HLA-DQA1*01-B1*05L HLA-DQA1*05:01-B1*02:01L HLA-DQA1*03:01-B1*03:02L
SMWSFNPETN

SEQ ID NO: 23118 - protein, 11 aa, Severe acute respiratory syndrome coronavirus 2
  REGION 1..11: note = Table B: HLA-DQA1*01-B1*05L HLA-DQA1*05:01-B1*02:01L HLA-DPA1*03:01-B1*105:01L HLA-DQA1*01:03-B1*06:01L
ILTRPLLESEL

SEQ ID NO: 23119 - protein, 10 aa, Severe acute respiratory syndrome coronavirus 2
  REGION 1..10: note = Table B: HLA-DQA1*01-B1*05L HLA-DQA1*05:01-B1*02:01L HLA-DQA1*03:01-B1*03:02L
DHSSSSDNIA

SEQ ID NO: 23120 - protein, 11 aa, Severe acute respiratory syndrome coronavirus 2
  REGION 1..11: note = Table B: HLA-DQA1*01-B1*05L HLA-DPA1*01:03-B1*04:02L HLA-DPA1*02:01-B1*13:01L HLA-DPA1*01:02-B1*04:01L HLA-DQA1*01:03-B1*06:01L HLA-DRB1*15:03L
TFKVSIWNLDY

SEQ ID NO: 23121 - protein, 11 aa, Severe acute respiratory syndrome coronavirus 2
  REGION 1..11: note = Table B: HLA-DQA1*01-B1*05L
VSIWNLDYIIN

SEQ ID NO: 23122 - protein, 11 aa, Severe acute respiratory syndrome coronavirus 2
  REGION 1..11: note = Table B: HLA-DQA1*01-B1*05L
NLDYIINLIIK

SEQ ID NO: 23123 - protein, 11 aa, Severe acute respiratory syndrome coronavirus 2
  REGION 1..11: note = Table B: HLA-DQA1*01-B1*05L HLA-DQA1*03:01-B1*03:02L
NKYSQLDEEQP

SEQ ID NO: 23124 - protein, 11 aa, Severe acute respiratory syndrome coronavirus 2
  REGION 1..11: note = Table B: HLA-DQA1*01-B1*05L
KYSQLDEEQPM

SEQ ID NO: 23125 - protein, 11 aa, Severe acute respiratory syndrome coronavirus 2
  REGION 1..11: note = Table B: HLA-DQA1*01-B1*05L HLA-DQA1*05:01-B1*02:01L
QLDEEQPMEID

SEQ ID NO: 23126 - protein, 10 aa, Severe acute respiratory syndrome coronavirus 2
  REGION 1..10: note = Table B: HLA-DQA1*01-B1*05L HLA-DQA1*03:01-B1*03:02L
TYEGNSPFHP

SEQ ID NO: 23127 - protein, 12 aa, Severe acute respiratory syndrome coronavirus 2
  REGION 1..12: note = Table B: HLA-DQA1*01-B1*05L HLA-DPA1*03:01-B1*105:01L HLA-DRB1*15:03L
IIFWFSLELQDH

SEQ ID NO: 23128 - protein, 11 aa, Severe acute respiratory syndrome coronavirus 2
  REGION 1..11: note = Table B: HLA-DQA1*01-B1*05L
TQHQPYVVDDP

SEQ ID NO: 23129 - protein, 11 aa, Severe acute respiratory syndrome coronavirus 2
  REGION 1..11: note = Table B: HLA-DQA1*01-B1*05L
QPYVVDDPCPI

SEQ ID NO: 23130 - protein, 10 aa, Severe acute respiratory syndrome coronavirus 2
  REGION 1..10: note = Table B: HLA-DQA1*01-B1*05L
SPIQYIDIGN

SEQ ID NO: 23131 - protein, 10 aa, Severe acute respiratory syndrome coronavirus 2
  REGION 1..10: note = Table B: HLA-DQA1*01-B1*05L
IQYIDIGNYT

SEQ ID NO: 23132 - protein, 11 aa, Severe acute respiratory syndrome coronavirus 2
  REGION 1..11: note = Table B: HLA-DQA1*01-B1*05L
VRCSFYEDFLE

SEQ ID NO: 23133 - protein, 10 aa, Severe acute respiratory syndrome coronavirus 2
  REGION 1..10: note = Table B: HLA-DQA1*01-B1*05L HLA-DPA1*03:01-B1*105:01L
DFLEYHDVRV

SEQ ID NO: 23134 - protein, 10 aa, Severe acute respiratory syndrome coronavirus 2
  REGION 1..10: note = Table B: HLA-DQA1*01-B1*05L HLA-DPA1*03:01-B1*105:01L HLA-DQA1*03:01-B1*03:02L HLA-DPA1*01:02-B1*04:01L HLA-DQA1*01:03-B1*06:01L HLA-DQA1*02:01-B1*03:03L
EYHDVRVVLD

SEQ ID NO: 23135 - protein, 11 aa, Severe acute respiratory syndrome coronavirus 2
  REGION 1..11: note = Table B: HLA-DQA1*01-B1*05L HLA-DQA1*05:01-B1*02:01L
NTNSSPDDQIG

SEQ ID NO: 23136 - protein, 12 aa, Severe acute respiratory syndrome coronavirus 2
  REGION 1..12: note = Table B: HLA-DQA1*01-B1*05L HLA-DQA1*05:01-B1*02:01L
EGALNTPKDHIG

SEQ ID NO: 23137 - protein, 11 aa, Severe acute respiratory syndrome coronavirus 2
  REGION 1..11: note = Table B: HLA-DQA1*01-B1*05L
TATKAYNVTQA

SEQ ID NO: 23138 - protein, 10 aa, Severe acute respiratory syndrome coronavirus 2
  REGION 1..10: note = Table B: HLA-DQA1*01-B1*05L HLA-DQA1*05:01-B1*02:01L HLA-DQA1*03:01-B1*03:02L HLA-DQA1*01:03-B1*06:01L HLA-DQA1*02:01-B1*03:03L
GNFGDQELIR

SEQ ID NO: 23139 - protein, 11 aa, Severe acute respiratory syndrome coronavirus 2
  REGION 1..11: note = Table B: HLA-DQA1*01-B1*05L
DKDPNFKDQVI

SEQ ID NO: 23140 - protein, 11 aa, Severe acute respiratory syndrome coronavirus 2
  REGION 1..11: note = Table B: HLA-DQA1*01-B1*05L HLA-DQA1*03:01-B1*03:02L
DAYKTFPPTEP

SEQ ID NO: 23141 - protein, 10 aa, Severe acute respiratory syndrome coronavirus 2
  REGION 1..10: note = Table B: HLA-DQA1*01-B1*05L
LPAADLDDFS

SEQ ID NO: 23142 - protein, 11 aa, Severe acute respiratory syndrome coronavirus 2
  REGION 1..11: note = Table B: HLA-DQA1*01-B1*05L HLA-DQA1*03:01-B1*03:02L
DLDDFSKQLQQ

SEQ ID NO: 23143 - protein, 14 aa, Severe acute respiratory syndrome coronavirus 2
  REGION 1..14: note = Table B: HLA-DQA1*05:05-B1*03:19L HLA-DPA1*03:01-B1*105:01L
GFGDSVEEVLSEAR

SEQ ID NO: 23144 - protein, 10 aa, Severe acute respiratory syndrome coronavirus 2
  REGION 1..10: note = Table B: HLA-DQA1*05:05-B1*03:19L HLA-DQA1*05:01-B1*02:01L
LGDELGTDPY

SEQ ID NO: 23145 - protein, 14 aa, Severe acute respiratory syndrome coronavirus 2
  REGION 1..14: note = Table B: HLA-DQA1*05:05-B1*03:19L HLA-DQA1*05:05-B1*03:01L
YVDNNFCGPDGYPL

SEQ ID NO: 23146 - protein, 10 aa, Severe acute respiratory syndrome coronavirus 2
  REGION 1..10: note = Table B: HLA-DQA1*05:05-B1*03:19L
LDFIDTKRGV

SEQ ID NO: 23147 - protein, 11 aa, Severe acute respiratory syndrome coronavirus 2
  REGION 1..11: note = Table B: HLA-DQA1*05:05-B1*03:19L
VFPLNSIIKTI

SEQ ID NO: 23148 - protein, 10 aa, Severe acute respiratory syndrome coronavirus 2
  REGION 1..10: note = Table B: HLA-DQA1*05:05-B1*03:19L
GDFVKATCEF

SEQ ID NO: 23149 - protein, 10 aa, Severe acute respiratory syndrome coronavirus 2
  REGION 1..10: note = Table B: HLA-DQA1*05:05-B1*03:19L
TKEGATTCGY

SEQ ID NO: 23150 - protein, 15 aa, Severe acute respiratory syndrome coronavirus 2
  REGION 1..15: note = Table B: HLA-DQA1*05:05-B1*03:19L
GATTCGYLPQNAVVK

SEQ ID NO: 23151 - protein, 11 aa, Severe acute respiratory syndrome coronavirus 2
  REGION 1..11: note = Table B: HLA-DQA1*05:05-B1*03:19L
IVGDFKLNEEI

SEQ ID NO: 23152 - protein, 15 aa, Severe acute respiratory syndrome coronavirus 2
  REGION 1..15: note = Table B: HLA-DQA1*05:05-B1*03:19L
NFKVTKGKAKKGAWN

SEQ ID NO: 23153 - protein, 10 aa, Severe acute respiratory syndrome coronavirus 2
  REGION 1..10: note = Table B: HLA-DQA1*05:05-B1*03:19L
AWNIGEQKSI

SEQ ID NO: 23154 - protein, 13 aa, Severe acute respiratory syndrome coronavirus 2
  REGION 1..13: note = Table B: HLA-DQA1*05:05-B1*03:19L
FISTCACEIVGGQ

SEQ ID NO: 23155 - protein, 12 aa, Severe acute respiratory syndrome coronavirus 2
  REGION 1..12: note = Table B: HLA-DQA1*05:05-B1*03:19L
IGGAKLKALNLG

SEQ ID NO: 23156 - protein, 14 aa, Severe acute respiratory syndrome coronavirus 2
  REGION 1..14: note = Table B: HLA-DQA1*05:05-B1*03:19L HLA-DPA1*03:01-B1*105:01L HLA-DRB1*15:03L
LKALNLGETFVTHS

SEQ ID NO: 23157 - protein, 11 aa, Severe acute respiratory syndrome coronavirus 2
  REGION 1..11: note = Table B: HLA-DQA1*05:05-B1*03:19L
LLMPLKAPKEI

SEQ ID NO: 23158 - protein, 11 aa, Severe acute respiratory syndrome coronavirus 2
  REGION 1..11: note = Table B: HLA-DQA1*05:05-B1*03:19L
PVSELLTPLGI

SEQ ID NO: 23159 - protein, 11 aa, Severe acute respiratory syndrome coronavirus 2
  REGION 1..11: note = Table B: HLA-DQA1*05:05-B1*03:19L HLA-DQA1*01:03-B1*06:01L HLA-DQA1*02:01-B1*03:03L
LTPLGIDLDEW

SEQ ID NO: 23160 - protein, 10 aa, Severe acute respiratory syndrome coronavirus 2
  REGION 1..10: note = Table B: HLA-DQA1*05:05-B1*03:19L HLA-DQA1*05:01-B1*02:01L
QYEYGTEDDY

SEQ ID NO: 23161 - protein, 11 aa, Severe acute respiratory syndrome coronavirus 2
  REGION 1..11: note = Table B: HLA-DQA1*05:05-B1*03:19L HLA-DQA1*05:01-B1*02:01L
LQPEEEQEEDW

SEQ ID NO: 23162 - protein, 13 aa, Severe acute respiratory syndrome coronavirus 2
  REGION 1..13: note = Table B: HLA-DQA1*05:05-B1*03:19L HLA-DRB1*16:01L
DDDSQQTVGQQDG

SEQ ID NO: 23163 - protein, 10 aa, Severe acute respiratory syndrome coronavirus 2
  REGION 1..10: note = Table B: HLA-DQA1*05:05-B1*03:19L
GSEDNQTTTI

SEQ ID NO: 23164 - protein, 12 aa, Severe acute respiratory syndrome coronavirus 2
  REGION 1..12: note = Table B: HLA-DQA1*05:05-B1*03:19L
SEDNQTTTIQTI

SEQ ID NO: 23165 - protein, 11 aa, Severe acute respiratory syndrome coronavirus 2
  REGION 1..11: note = Table B: HLA-DQA1*05:05-B1*03:19L HLA-DQA1*03:01-B1*03:02L
VEVQPQLEMEL

SEQ ID NO: 23166 - protein, 10 aa, Severe acute respiratory syndrome coronavirus 2
  REGION 1..10: note = Table B: HLA-DQA1*05:05-B1*03:19L HLA-DQA1*02:01-B1*03:03L HLA-DRB1*15:03L
YLKLTDNVYI

SEQ ID NO: 23167 - protein, 10 aa, Severe acute respiratory syndrome coronavirus 2
  REGION 1..10: note = Table B: HLA-DQA1*05:05-B1*03:19L
ADIVEEAKKV

SEQ ID NO: 23168 - protein, 10 aa, Severe acute respiratory syndrome coronavirus 2
  REGION 1..10: note = Table B: HLA-DQA1*05:05-B1*03:19L
CVDTVRTNVY

SEQ ID NO: 23169 - protein, 10 aa, Severe acute respiratory syndrome coronavirus 2
  REGION 1..10: note = Table B: HLA-DQA1*05:05-B1*03:19L HLA-DPA1*01:03-B1*104:01L
FLTENLLLYI

SEQ ID NO: 23170 - protein, 10 aa, Severe acute respiratory syndrome coronavirus 2
  REGION 1..10: note = Table B: HLA-DQA1*05:05-B1*03:19L HLA-DPA1*01:03-B1*104:01L
TENLLLYIDI

SEQ ID NO: 23171 - protein, 10 aa, Severe acute respiratory syndrome coronavirus 2
  REGION 1..10: note = Table B: HLA-DQA1*05:05-B1*03:19L
QEGVLTAVVI

SEQ ID NO: 23172 - protein, 11 aa, Severe acute respiratory syndrome coronavirus 2
  REGION 1..11: note = Table B: HLA-DQA1*05:05-B1*03:19L HLA-DQA1*05:01-B1*02:01L
KVPTDNYITTY

SEQ ID NO: 23173 - protein, 10 aa, Severe acute respiratory syndrome coronavirus 2
  REGION 1..10: note = Table B: HLA-DQA1*05:05-B1*03:19L
NDLNETLVTM

SEQ ID NO: 23174 - protein, 12 aa, Severe acute respiratory syndrome coronavirus 2
  REGION 1..12: note = Table B: HLA-DQA1*05:05-B1*03:19L HLA-DRB1*16:01L
IEFLKRGDKSVY

SEQ ID NO: 23175 - protein, 10 aa, Severe acute respiratory syndrome coronavirus 2
  REGION 1..10: note = Table B: HLA-DQA1*05:05-B1*03:19L HLA-DPA1*01:03-B1*104:01L
VDNINLHTQV

SEQ ID NO: 23176 - protein, 12 aa, Severe acute respiratory syndrome coronavirus 2
  REGION 1..12: note = Table B: HLA-DQA1*05:05-B1*03:19L HLA-DQA1*05:01-B1*02:01L HLA-DRB1*12:01L HLA-DRB1*15:03L
VVDMSMTYGQQF

SEQ ID NO: 23177 - protein, 10 aa, Severe acute respiratory syndrome coronavirus 2
  REGION 1..10: note = Table B: HLA-DQA1*05:05-B1*03:19M HLA-DPA1*01:03-B1*104:01L
GEAANFCALI

SEQ ID NO: 23178 - protein, 10 aa, Severe acute respiratory syndrome coronavirus 2
  REGION 1..10: note = Table B: HLA-DQA1*05:05-B1*03:19L HLA-DPA1*01:03-B1*104:01L
YKENSYTTTI

SEQ ID NO: 23179 - protein, 14 aa, Severe acute respiratory syndrome coronavirus 2
  REGION 1..14: note = Table B: HLA-DQA1*05:05-B1*03:19L HLA-DRB1*12:01L HLA-DRB1*04:08L
LDGVVCTEIDPKLD

SEQ ID NO: 23180 - protein, 10 aa, Severe acute respiratory syndrome coronavirus 2
  REGION 1..10: note = Table B: HLA-DQA1*05:05-B1*03:19L HLA-DRB1*16:01L HLA-DQA1*01:03-B1*06:01L HLA-DQA1*02:01-B1*03:03L
IDYKHYTPSF

SEQ ID NO: 23181 - protein, 12 aa, Severe acute respiratory syndrome coronavirus 2
  REGION 1..12: note = Table B: HLA-DQA1*05:05-B1*03:19L
ATNKATYKPNTW

SEQ ID NO: 23182 - protein, 15 aa, Severe acute respiratory syndrome coronavirus 2
  REGION 1..15: note = Table B: HLA-DQA1*05:05-B1*03:19L
GMDNLACEDLKPVSE

SEQ ID NO: 23183 - protein, 11 aa, Severe acute respiratory syndrome coronavirus 2
  REGION 1..11: note = Table B: HLA-DQA1*05:05-B1*03:19L
ILKPANNSLKI

SEQ ID NO: 23184 - protein, 10 aa, Severe acute respiratory syndrome coronavirus 2
  REGION 1..10: note = Table B: HLA-DQA1*05:05-B1*03:19L
PNELSRVLGL

SEQ ID NO: 23185 - protein, 10 aa, Severe acute respiratory syndrome coronavirus 2
  REGION 1..10: note = Table B: HLA-DQA1*05:05-B1*03:19L
KFCLEASFNY

SEQ ID NO: 23186 - protein, 15 aa, Severe acute respiratory syndrome coronavirus 2
  REGION 1..15: note = Table B: HLA-DQA1*05:05-B1*03:19L
TGSIPCSVCLSGLDS

SEQ ID NO: 23187 - protein, 10 aa, Severe acute respiratory syndrome coronavirus 2
  REGION 1..10: note = Table B: HLA-DQA1*05:05-B1*03:19L HLA-DPA1*01:03-B1*104:01L
LDTYPSLETI

SEQ ID NO: 23188 - protein, 10 aa, Severe acute respiratory syndrome coronavirus 2
  REGION 1..10: note = Table B: HLA-DQA1*05:05-B1*03:19L HLA-DQA1*05:05-B1*03:116L HLA-DPA1*02:01-B1*13:01L HLA-DQA1*01:03-B1*06:01L HLA-DRB1*15:03L
TYPSLETIQI

SEQ ID NO: 23189 - protein, 14 aa, Severe acute respiratory syndrome coronavirus 2
  REGION 1..14: note = Table B: HLA-DQA1*05:05-B1*03:19L
PSLETIQITISSFK

SEQ ID NO: 23190 - protein, 10 aa, Severe acute respiratory syndrome coronavirus 2
  REGION 1..10: note = Table B: HLA-DQA1*05:05-B1*03:19L
LVAEWFLAYI

SEQ ID NO: 23191 - protein, 10 aa, Severe acute respiratory syndrome coronavirus 2
  REGION 1..10: note = Table B: HLA-DQA1*05:05-B1*03:19L
AEWFLAYILF

SEQ ID NO: 23192 - protein, 10 aa, Severe acute respiratory syndrome coronavirus 2
  REGION 1..10: note = Table B: HLA-DQA1*05:05-B1*03:19L
VECTTIVNGV

SEQ ID NO: 23193 - protein, 15 aa, Severe acute respiratory syndrome coronavirus 2
  REGION 1..15: note = Table B: HLA-DQA1*05:05-B1*03:19L HLA-DPA1*03:01-B1*105:01L
DTFCAGSTFISDEVA

SEQ ID NO: 23194 - protein, 13 aa, Severe acute respiratory syndrome coronavirus 2
  REGION 1..13: note = Table B: HLA-DQA1*05:05-B1*03:19L HLA-DRB1*08:02L
SHFVNLDNLRANN

SEQ ID NO: 23195 - protein, 13 aa, Severe acute respiratory syndrome coronavirus 2
  REGION 1..13: note = Table B: HLA-DQA1*05:05-B1*03:19L HLA-DPA1*01:02-B1*04:01L
VIVFDGKSKCEES

SEQ ID NO: 23196 - protein, 16 aa, Severe acute respiratory syndrome coronavirus 2
  REGION 1..16: note = Table B: HLA-DQA1*05:05-B1*03:19L
VVNVVTTKIALKGGKI

SEQ ID NO: 23197 - protein, 10 aa, Severe acute respiratory syndrome coronavirus 2
  REGION 1..10: note = Table B: HLA-DQA1*05:05-B1*03:19L
SSEIIGYKAI

SEQ ID NO: 23198 - protein, 11 aa, Severe acute respiratory syndrome coronavirus 2
  REGION 1..11: note = Table B: HLA-DQA1*05:05-B1*03:19L HLA-DQA1*05:01-B1*02:01L HLA-DPA1*03:01-B1*105:01L HLA-DQA1*01:03-B1*06:01L
FANKHADFDTW

SEQ ID NO: 23199 - protein, 10 aa, Severe acute respiratory syndrome coronavirus 2
  REGION 1..10: note = Table B: HLA-DQA1*05:05-B1*03:19L
YTNDKACPLI

SEQ ID NO: 23200 - protein, 10 aa, Severe acute respiratory syndrome coronavirus 2
  REGION 1..10: note = Table B: HLA-DQA1*05:05-B1*03:19L
GDFLHFLPRV

SEQ ID NO: 23201 - protein, 10 aa, Severe acute respiratory syndrome coronavirus 2
  REGION 1..10: note = Table B: HLA-DQA1*05:05-B1*03:19L
CYTPSKLIEY

SEQ ID NO: 23202 - protein, 10 aa, Severe acute respiratory syndrome coronavirus 2
  REGION 1..10: note = Table B: HLA-DQA1*05:05-B1*03:19L HLA-DQA1*05:01-B1*02:01L
TNVLEGSVAY

SEQ ID NO: 23203 - protein, 12 aa, Severe acute respiratory syndrome coronavirus 2
  REGION 1..12: note = Table B: HLA-DQA1*05:05-B1*03:19L HLA-DQA1*02:01-B1*03:03L
EAGVCVSTSGRW

SEQ ID NO: 23204 - protein, 10 aa, Severe acute respiratory syndrome coronavirus 2
  REGION 1..10: note = Table B: HLA-DQA1*05:05-B1*03:19L HLA-DQA1*02:01-B1*03:03L
SGRWVLNNDY

SEQ ID NO: 23205 - protein, 10 aa, Severe acute respiratory syndrome coronavirus 2
  REGION 1..10: note = Table B: HLA-DQA1*05:05-B1*03:19L HLA-DPA1*01:03-B1*104:01L
NDYYRSLPGV

SEQ ID NO: 23206 - protein, 15 aa, Severe acute respiratory syndrome coronavirus 2
  REGION 1..15: note = Table B: HLA-DQA1*05:05-B1*03:19L
LPGVFCGVDAVNLLT

SEQ ID NO: 23207 - protein, 16 aa, Severe acute respiratory syndrome coronavirus 2
  REGION 1..16: note = Table B: HLA-DQA1*05:05-B1*03:19L
TSYREAACCHLAKALN

SEQ ID NO: 23208 - protein, 17 aa, Severe acute respiratory syndrome coronavirus 2
  REGION 1..17: note = Table B: HLA-DQA1*05:05-B1*03:19L
DLLIRKSNHNFLVQAGN

SEQ ID NO: 23209 - protein, 12 aa, Severe acute respiratory syndrome coronavirus 2
  REGION 1..12: note = Table B: HLA-DQA1*05:05-B1*03:19L HLA-DQA1*05:05-B1*03:01L
GSFLNGSCGSVG

SEQ ID NO: 23210 - protein, 13 aa, Severe acute respiratory syndrome coronavirus 2
  REGION 1..13: note = Table B: HLA-DQA1*05:05-B1*03:19L HLA-DQA1*01:03-B1*06:01L
SFLNGSCGSVGFN

SEQ ID NO: 23211 - protein, 10 aa, Severe acute respiratory syndrome coronavirus 2
  REGION 1..10: note = Table B: HLA-DQA1*05:05-B1*03:19L
IDYDCVSFCY

SEQ ID NO: 23212 - protein, 13 aa, Severe acute respiratory syndrome coronavirus 2
  REGION 1..13: note = Table B: HLA-DQA1*05:05-B1*03:19L
PTGVHAGTDLEGN

SEQ ID NO: 23213 - protein, 15 aa, Severe acute respiratory syndrome coronavirus 2
  REGION 1..15: note = Table B: HLA-DQA1*05:05-B1*03:19L
EGNFYGPFVDRQTAQ

SEQ ID NO: 23214 - protein, 11 aa, Severe acute respiratory syndrome coronavirus 2
  REGION 1..11: note = Table B: HLA-DQA1*05:05-B1*03:19L HLA-DRB1*15:03L
FTTTLNDFNLV

SEQ ID NO: 23215 - protein, 10 aa, Severe acute respiratory syndrome coronavirus 2
  REGION 1..10: note = Table B: HLA-DQA1*05:05-B1*03:19L
FNLVAMKYNY

SEQ ID NO: 23216 - protein, 11 aa, Severe acute respiratory syndrome coronavirus 2
  REGION 1..11: note = Table B: HLA-DQA1*05:05-B1*03:19L
YNYEPLTQDHV

SEQ ID NO: 23217 - protein, 15 aa, Severe acute respiratory syndrome coronavirus 2
  REGION 1..15: note = Table B: HLA-DQA1*05:05-B1*03:19L HLA-DRB1*04:08L
VVRQCSGVTFQSAVK

SEQ ID NO: 23218 - protein, 10 aa, Severe acute respiratory syndrome coronavirus 2
  REGION 1..10: note = Table B: HLA-DQA1*05:05-B1*03:19L HLA-DPA1*01:03-B1*104:01L HLA-DQA1*01:03-B1*06:01L
GTHHWLLLTI

SEQ ID NO: 23219 - protein, 11 aa, Severe acute respiratory syndrome coronavirus 2
  REGION 1..11: note = Table B: HLA-DQA1*05:05-B1*03:19L HLA-DPA1*02:01-B1*13:01L HLA-DPA1*01:03-B1*104:01L HLA-DQA1*01:03-B1*06:01L
VYYGNALDQAI

SEQ ID NO: 23220 - protein, 13 aa, Severe acute respiratory syndrome coronavirus 2
  REGION 1..13: note = Table B: HLA-DQA1*05:05-B1*03:19L
NSQGLLPPKNSID

SEQ ID NO: 23221 - protein, 12 aa, Severe acute respiratory syndrome coronavirus 2
  REGION 1..12: note = Table B: HLA-DQA1*05:05-B1*03:19L HLA-DQA1*01:03-B1*06:01L
GLLPPKNSIDAF

SEQ ID NO: 23222 - protein, 10 aa, Severe acute respiratory syndrome coronavirus 2
  REGION 1..10: note = Table B: HLA-DQA1*05:05-B1*03:19L
LDNRATLQAI

SEQ ID NO: 23223 - protein, 14 aa, Severe acute respiratory syndrome coronavirus 2
  REGION 1..14: note = Table B: HLA-DQA1*05:05-B1*03:19L
SEFDRDAAMQRKLE

SEQ ID NO: 23224 - protein, 13 aa, Severe acute respiratory syndrome coronavirus 2
  REGION 1..13: note = Table B: HLA-DQA1*05:05-B1*03:19L
SEDKRAKVTSAMQ

SEQ ID NO: 23225 - protein, 10 aa, Severe acute respiratory syndrome coronavirus 2
  REGION 1..10: note = Table B: HLA-DQA1*05:05-B1*03:19L
LDNDALNNII

SEQ ID NO: 23226 - protein, 10 aa, Severe acute respiratory syndrome coronavirus 2
  REGION 1..10: note = Table B: HLA-DQA1*05:05-B1*03:19L HLA-DQA1*05:01-B1*02:01L
AKLMVVIPDY

SEQ ID NO: 23227 - protein, 10 aa, Severe acute respiratory syndrome coronavirus 2
  REGION 1..10: note = Table B: HLA-DQA1*05:05-B1*03:19L HLA-DQA1*05:01-B1*02:01L
SMDNSPNLAW

SEQ ID NO: 23228 - protein, 11 aa, Severe acute respiratory syndrome coronavirus 2
  REGION 1..11: note = Table B: HLA-DQA1*05:05-B1*03:19L HLA-DPA1*03:01-B1*105:01L
ANSAVKLQNNE

SEQ ID NO: 23229 - protein, 10 aa, Severe acute respiratory syndrome coronavirus 2
  REGION 1..10: note = Table B: HLA-DQA1*05:05-B1*03:19L HLA-DQA1*05:01-B1*02:01L
ACTDDNALAY

SEQ ID NO: 23230 - protein, 10 aa, Severe acute respiratory syndrome coronavirus 2
  REGION 1..10: note = Table B: HLA-DQA1*05:05-B1*03:19L
PKSDGTGTIY

SEQ ID NO: 23231 - protein, 13 aa, Severe acute respiratory syndrome coronavirus 2
  REGION 1..13: note = Table B: HLA-DQA1*05:05-B1*03:19L HLA-DPA1*03:01-B1*105:01L
LNRGMVLGSLAAT

SEQ ID NO: 23232 - protein, 11 aa, Severe acute respiratory syndrome coronavirus 2
  REGION 1..11: note = Table B: HLA-DQA1*05:05-B1*03:19L HLA-DPA1*03:01-B1*105:01L HLA-DRB1*14:17L
LAATVRLQAGN

SEQ ID NO: 23233 - protein, 14 aa, Severe acute respiratory syndrome coronavirus 2
  REGION 1..14: note = Table B: HLA-DQA1*05:05-B1*03:19L HLA-DQA1*05:05-B1*03:01L HLA-DQA1*02:01-B1*03:03L
VPANSTVLSFCAFA

SEQ ID NO: 23234 - protein, 16 aa, Severe acute respiratory syndrome coronavirus 2
  REGION 1..16: note = Table B: HLA-DQA1*05:05-B1*03:19L
GGQPITNCVKMLCTHT

SEQ ID NO: 23235 - protein, 10 aa, Severe acute respiratory syndrome coronavirus 2
  REGION 1..10: note = Table B: HLA-DQA1*05:05-B1*03:19L
PEANMDQESF

SEQ ID NO: 23236 - protein, 10 aa, Severe acute respiratory syndrome coronavirus 2
  REGION 1..10: note = Table B: HLA-DQA1*05:05-B1*03:19L
QESFGGASCC

SEQ ID NO: 23237 - protein, 10 aa, Severe acute respiratory syndrome coronavirus 2
  REGION 1..10: note = Table B: HLA-DQA1*05:05-B1*03:19L
FTLKNTVCTV

SEQ ID NO: 23238 - protein, 19 aa, Severe acute respiratory syndrome coronavirus 2
  REGION 1..19: note = Table B: HLA-DQA1*05:05-B1*03:19L
DAQSFLNRVCGVSAARLTP

SEQ ID NO: 23239 - protein, 14 aa, Severe acute respiratory syndrome coronavirus 2
  REGION 1..14: note = Table B: HLA-DQA1*05:05-B1*03:19L HLA-DQA1*01:03-B1*06:01L
RLTPCGTGTSTDVV

SEQ ID NO: 23240 - protein, 10 aa, Severe acute respiratory syndrome coronavirus 2
  REGION 1..10: note = Table B: HLA-DQA1*05:05-B1*03:19L
TDVVYRAFDI

SEQ ID NO: 23241 - protein, 10 aa, Severe acute respiratory syndrome coronavirus 2
  REGION 1..10: note = Table B: HLA-DQA1*05:05-B1*03:19L HLA-DQA1*02:01-B1*03:03L
NDKVAGFAKF

SEQ ID NO: 23242 - protein, 10 aa, Severe acute respiratory syndrome coronavirus 2
  REGION 1..10: note = Table B: HLA-DQA1*05:05-B1*03:19L
EDDNLIDSYF

SEQ ID NO: 23243 - protein, 10 aa, Severe acute respiratory syndrome coronavirus 2
  REGION 1..10: note = Table B: HLA-DQA1*05:05-B1*03:19L
KEILVTYNCC

SEQ ID NO: 23244 - protein, 10 aa, Severe acute respiratory syndrome coronavirus 2
  REGION 1..10: note = Table B: HLA-DQA1*05:05-B1*03:19L
DDDYFNKKDW

SEQ ID NO: 23245 - protein, 10 aa, Severe acute respiratory syndrome coronavirus 2
  REGION 1..10: note = Table B: HLA-DQA1*05:05-B1*03:19L HLA-DQA1*05:01-B1*02:01L
LDNQDLNGNW

SEQ ID NO: 23246 - protein, 10 aa, Severe acute respiratory syndrome coronavirus 2
  REGION 1..10: note = Table B: HLA-DQA1*05:05-B1*03:19L
QDLNGNWYDF

SEQ ID NO: 23247 - protein, 10 aa, Severe acute respiratory syndrome coronavirus 2
  REGION 1..10: note = Table B: HLA-DQA1*05:05-B1*03:19L
GSGVPVVDSY

SEQ ID NO: 23248 - protein, 11 aa, Severe acute respiratory syndrome coronavirus 2
  REGION 1..11: note = Table B: HLA-DQA1*05:05-B1*03:19L HLA-DPA1*01:03-B1*104:01L
RELGVVHNQDV

SEQ ID NO: 23249 - protein, 12 aa, Severe acute respiratory syndrome coronavirus 2
  REGION 1..12: note = Table B: HLA-DQA1*05:05-B1*03:19L HLA-DQA1*05:05-B1*03:01L
ADPAMHAASGNL

SEQ ID NO: 23250 - protein, 10 aa, Severe acute respiratory syndrome coronavirus 2
  REGION 1..10: note = Table B: HLA-DQA1*05:05-B1*03:19L
LTNNVAFQTV

SEQ ID NO: 23251 - protein, 10 aa, Severe acute respiratory syndrome coronavirus 2
  REGION 1..10: note = Table B: HLA-DQA1*05:05-B1*03:19L
QDGNAAISDY

SEQ ID NO: 23252 - protein, 10 aa, Severe acute respiratory syndrome coronavirus 2
  REGION 1..10: note = Table B: HLA-DQA1*05:05-B1*03:19M HLA-DPA1*01:03-B1*104:01L
VEVVDKYFDC

SEQ ID NO: 23253 - protein, 15 aa, Severe acute respiratory syndrome coronavirus 2
  REGION 1..15: note = Table B: HLA-DQA1*05:05-B1*03:19L HLA-DQA1*02:01-B1*03:03L
VVDKYFDCYDGGCIN

SEQ ID NO: 23254 - protein, 10 aa, Severe acute respiratory syndrome coronavirus 2
  REGION 1..10: note = Table B: HLA-DQA1*05:05-B1*03:19L
ARLYYDSMSY

SEQ ID NO: 23255 - protein, 12 aa, Severe acute respiratory syndrome coronavirus 2
  REGION 1..12: note = Table B: HLA-DQA1*05:05-B1*03:19L HLA-DQA1*05:05-B1*03:01L HLA-DQA1*01:03-B1*06:01L
TVAGVSICSTMT

SEQ ID NO: 23256 - protein, 10 aa, Severe acute respiratory syndrome coronavirus 2
  REGION 1..10: note = Table B: HLA-DQA1*05:05-B1*03:19L HLA-DRB1*16:01L HLA-DQA1*02:01-B1*03:03L
IAATRGATVV

SEQ ID NO: 23257 - protein, 10 aa, Severe acute respiratory syndrome coronavirus 2
  REGION 1..10: note = Table B: HLA-DQA1*05:05-B1*03:19L
ENPHLMGWDY

SEQ ID NO: 23258 - protein, 18 aa, Severe acute respiratory syndrome coronavirus 2
  REGION 1..18: note = Table B: HLA-DQA1*05:05-B1*03:19L
LQHRLYECLYRNRDVDTD

SEQ ID NO: 23259 - protein, 12 aa, Severe acute respiratory syndrome coronavirus 2
  REGION 1..12: note = Table B: HLA-DQA1*05:05-B1*03:19L
SDDAVVCFNSTY

SEQ ID NO: 23260 - protein, 13 aa, Severe acute respiratory syndrome coronavirus 2
  REGION 1..13: note = Table B: HLA-DQA1*05:05-B1*03:19L HLA-DPA1*01:03-B1*04:02L HLA-DQA1*05:05-B1*03:01L HLA-DQA1*02:01-B1*03:03L
VFMSEAKCWTETD

SEQ ID NO: 23261 - protein, 14 aa, Severe acute respiratory syndrome coronavirus 2
  REGION 1..14: note = Table B: HLA-DQA1*05:05-B1*03:19L HLA-DPA1*03:01-B1*105:01L HLA-DQA1*05:05-B1*03:01L
VLQAVGACVLCNSQ

SEQ ID NO: 23262 - protein, 14 aa, Severe acute respiratory syndrome coronavirus 2
  REGION 1..14: note = Table B: HLA-DQA1*05:05-B1*03:19L HLA-DPA1*03:01-B1*105:01L
LQAVGACVLCNSQT

SEQ ID NO: 23263 - protein, 10 aa, Severe acute respiratory syndrome coronavirus 2
  REGION 1..10: note = Table B: HLA-DQA1*05:05-B1*03:19L
SDNVTDFNAI

SEQ ID NO: 23264 - protein, 12 aa, Severe acute respiratory syndrome coronavirus 2
  REGION 1..12: note = Table B: HLA-DQA1*05:05-B1*03:19L HLA-DQA1*05:01-B1*02:01L
VTDFNAIATCDW

SEQ ID NO: 23265 - protein, 14 aa, Severe acute respiratory syndrome coronavirus 2
  REGION 1..14: note = Table B: HLA-DQA1*05:05-B1*03:19L HLA-DPA1*03:01-B1*105:01L HLA-DQA1*05:05-B1*03:01L HLA-DQA1*02:01-B1*03:03L
TNAGDYILANTCTE

SEQ ID NO: 23266 - protein, 10 aa, Severe acute respiratory syndrome coronavirus 2
  REGION 1..10: note = Table B: HLA-DQA1*05:05-B1*03:19M HLA-DPA1*01:03-B1*104:01L
EETFKLSYGI

SEQ ID NO: 23267 - protein, 13 aa, Severe acute respiratory syndrome coronavirus 2
  REGION 1..13: note = Table B: HLA-DQA1*05:05-B1*03:19L
TFKLSYGIATVRE

SEQ ID NO: 23268 - protein, 10 aa, Severe acute respiratory syndrome coronavirus 2
  REGION 1..10: note = Table B: HLA-DQA1*05:05-B1*03:19L HLA-DRB1*16:01L
RVTKNSKVQI

SEQ ID NO: 23269 - protein, 18 aa, Severe acute respiratory syndrome coronavirus 2
  REGION 1..18: note = Table B: HLA-DQA1*05:05-B1*03:19L HLA-DQA1*05:01-B1*02:01L HLA-DPA1*01:03-B1*104:01L HLA-DQA1*05:05-B1*03:01L HLA-DRB1*08:02L HLA-DRB1*08:03L
EKALKYLPIDKCSRIIPA

SEQ ID NO: 23270 - protein, 14 aa, Severe acute respiratory syndrome coronavirus 2
  REGION 1..14: note = Table B: HLA-DQA1*05:05-B1*03:19L HLA-DPA1*03:01-B1*105:01L HLA-DQA1*05:05-B1*03:01L HLA-DQA1*01:03-B1*06:01L
VFCTVNALPETTAD

SEQ ID NO: 23271 - protein, 10 aa, Severe acute respiratory syndrome coronavirus 2
  REGION 1..10: note = Table B: HLA-DQA1*05:05-B1*03:19L
PETTADIVVF

SEQ ID NO: 23272 - protein, 10 aa, Severe acute respiratory syndrome coronavirus 2
  REGION 1..10: note = Table B: HLA-DQA1*05:05-B1*03:19L
TADIVVFDEI

SEQ ID NO: 23273 - protein, 11 aa, Severe acute respiratory syndrome coronavirus 2
  REGION 1..11: note = Table B: HLA-DQA1*05:05-B1*03:19L HLA-DQA1*05:01-B1*02:01L
ILCIMSDRDLY

SEQ ID NO: 23274 - protein, 13 aa, Severe acute respiratory syndrome coronavirus 2
  REGION 1..13: note = Table B: HLA-DQA1*05:05-B1*03:19L HLA-DQA1*05:05-B1*03:01L
LHPTQAPTHLSVD

SEQ ID NO: 23275 - protein, 14 aa, Severe acute respiratory syndrome coronavirus 2
  REGION 1..14: note = Table B: HLA-DQA1*05:05-B1*03:19L HLA-DRB1*04:08L
VNGYPNMFITREEA

SEQ ID NO: 23276 - protein, 18 aa, Severe acute respiratory syndrome coronavirus 2
  REGION 1..18: note = Table B: HLA-DQA1*05:05-B1*03:19L
VDTPNNTDFSRVSAKPPP

SEQ ID NO: 23277 - protein, 10 aa, Severe acute respiratory syndrome coronavirus 2
  REGION 1..10: note = Table B: HLA-DQA1*05:05-B1*03:19L HLA-DPA1*01:03-B1*104:01L
FDYVYNPFMI

SEQ ID NO: 23278 - protein, 16 aa, Severe acute respiratory syndrome coronavirus 2
  REGION 1..16: note = Table B: HLA-DQA1*05:05-B1*03:19L HLA-DPA1*01:03-B1*04:02L
SNHDLYCQVHGNAHVA

SEQ ID NO: 23279 - protein, 11 aa, Severe acute respiratory syndrome coronavirus 2
  REGION 1..11: note = Table B: HLA-DQA1*05:05-B1*03:19L
YDAQPCSDKAY

SEQ ID NO: 23280 - protein, 10 aa, Severe acute respiratory syndrome coronavirus 2
  REGION 1..10: note = Table B: HLA-DQA1*05:05-B1*03:19L HLA-DQA1*05:01-B1*02:01L HLA-DQA1*03:01-B1*03:02L
GKQVVSDIDY

SEQ ID NO: 23281 - protein, 11 aa, Severe acute respiratory syndrome coronavirus 2
  REGION 1..11: note = Table B: HLA-DQA1*05:05-B1*03:19L HLA-DPA1*01:03-B1*104:01L
RLYLDAYNMMI

SEQ ID NO: 23282 - protein, 10 aa, Severe acute respiratory syndrome coronavirus 2
  REGION 1..10: note = Table B: HLA-DQA1*05:05-B1*03:19L
FDTYNLWNTF

SEQ ID NO: 23283 - protein, 12 aa, Severe acute respiratory syndrome coronavirus 2
  REGION 1..12: note = Table B: HLA-DQA1*05:05-B1*03:19L HLA-DPA1*01:03-B1*104:01L HLA-DQA1*01:03-B1*06:01L
GEVPVSIINNTV

SEQ ID NO: 23284 - protein, 11 aa, Severe acute respiratory syndrome coronavirus 2
  REGION 1..11: note = Table B: HLA-DQA1*05:05-B1*03:19L HLA-DRB1*15:03L
YTKVDGVDVEL

SEQ ID NO: 23285 - protein, 10 aa, Severe acute respiratory syndrome coronavirus 2
  REGION 1..10: note = Table B: HLA-DQA1*05:05-B1*03:19L HLA-DQA1*05:01-B1*02:01L
VDIAANTVIW

SEQ ID NO: 23286 - protein, 14 aa, Severe acute respiratory syndrome coronavirus 2
  REGION 1..14: note = Table B: HLA-DQA1*05:05-B1*03:19L HLA-DRB1*07:01L
VIWDYKRDAPAHIS

SEQ ID NO: 23287 - protein, 10 aa, Severe acute respiratory syndrome coronavirus 2
  REGION 1..10: note = Table B: HLA-DQA1*05:05-B1*03:19L HLA-DPA1*01:03-B1*104:01L
TETICAPLTV

SEQ ID NO: 23288 - protein, 10 aa, Severe acute respiratory syndrome coronavirus 2
  REGION 1..10: note = Table B: HLA-DQA1*05:05-B1*03:19L HLA-DPA1*01:03-B1*104:01L
KLEGYAFEHI

SEQ ID NO: 23289 - protein, 11 aa, Severe acute respiratory syndrome coronavirus 2
  REGION 1..11: note = Table B: HLA-DQA1*05:05-B1*03:19L
LEDFIPMDSTV

SEQ ID NO: 23290 - protein, 10 aa, Severe acute respiratory syndrome coronavirus 2
  REGION 1..10: note = Table B: HLA-DQA1*05:05-B1*03:19L
MDSTVKNYFI

SEQ ID NO: 23291 - protein, 10 aa, Severe acute respiratory syndrome coronavirus 2
  REGION 1..10: note = Table B: HLA-DQA1*05:05-B1*03:19L
IDYTEISFML

SEQ ID NO: 23292 - protein, 10 aa, Severe acute respiratory syndrome coronavirus 2
  REGION 1..10: note = Table B: HLA-DQA1*05:05-B1*03:19L
LLEKCDLQNY

SEQ ID NO: 23293 - protein, 12 aa, Severe acute respiratory syndrome coronavirus 2
  REGION 1..12: note = Table B: HLA-DQA1*05:05-B1*03:19L HLA-DQA1*05:05-B1*03:01L
GSDKGVAPGTAV

SEQ ID NO: 23294 - protein, 13 aa, Severe acute respiratory syndrome coronavirus 2
  REGION 1..13: note = Table B: HLA-DQA1*05:05-B1*03:19L HLA-DQA1*03:01-B1*03:02L HLA-DQA1*05:05-B1*03:01L
APGTAVLRQWLPT

SEQ ID NO: 23295 - protein, 10 aa, Severe acute respiratory syndrome coronavirus 2
  REGION 1..10: note = Table B: HLA-DQA1*05:05-B1*03:19L HLA-DQA1*02:01-B1*03:03L
TKENDSKEGF

SEQ ID NO: 23296 - protein, 10 aa, Severe acute respiratory syndrome coronavirus 2
  REGION 1..10: note = Table B: HLA-DQA1*05:05-B1*03:19L
ALGGSVAIKI

SEQ ID NO: 23297 - protein, 12 aa, Severe acute respiratory syndrome coronavirus 2
  REGION 1..12: note = Table B: HLA-DQA1*05:05-B1*03:19L HLA-DQA1*05:05-B1*03:01L HLA-DQA1*02:01-B1*03:03L
WWTAFVTNVNAS

SEQ ID NO: 23298 - protein, 12 aa, Severe acute respiratory syndrome coronavirus 2
  REGION 1..12: note = Table B: HLA-DQA1*05:05-B1*03:19L
YLGKPREQIDGY

SEQ ID NO: 23299 - protein, 12 aa, Severe acute respiratory syndrome coronavirus 2
  REGION 1..12: note = Table B: HLA-DQA1*05:05-B1*03:19L HLA-DQA1*05:05-B1*03:01L
LRGTAVMSLKEG

SEQ ID NO: 23300 - protein, 14 aa, Severe acute respiratory syndrome coronavirus 2
  REGION 1..14: note = Table B: HLA-DQA1*05:05-B1*03:19L HLA-DPA1*01:03-B1*104:01L
ENNRVVISSDVLVN

SEQ ID NO: 23301 - protein, 10 aa, Severe acute respiratory syndrome coronavirus 2
  REGION 1..10: note = Table B: HLA-DQA1*05:05-B1*03:19L
TNSFTRGVYY

SEQ ID NO: 23302 - protein, 14 aa, Severe acute respiratory syndrome coronavirus 2
  REGION 1..14: note = Table B: HLA-DQA1*05:05-B1*03:19L
NSFTRGVYYPDKVF

SEQ ID NO: 23303 - protein, 11 aa, Severe acute respiratory syndrome coronavirus 2
  REGION 1..11: note = Table B: HLA-DQA1*05:05-B1*03:19L HLA-DQA1*01:03-B1*06:01L HLA-DQA1*02:01-B1*03:03L
YYPDKVFRSSV

SEQ ID NO: 23304 - protein, 10 aa, Severe acute respiratory syndrome coronavirus 2
  REGION 1..10: note = Table B: HLA-DQA1*05:05-B1*03:19L HLA-DPA1*02:01-B1*13:01L HLA-DQA1*01:03-B1*06:01L
YFASTEKSNI

SEQ ID NO: 23305 - protein, 14 aa, Severe acute respiratory syndrome coronavirus 2
  REGION 1..14: note = Table B: HLA-DQA1*05:05-B1*03:19L
PGDSSSGWTAGAAA

SEQ ID NO: 23306 - protein, 11 aa, Severe acute respiratory syndrome coronavirus 2
  REGION 1..11: note = Table B: HLA-DQA1*05:05-B1*03:19L
KLPDDFTGCVI

SEQ ID NO: 23307 - protein, 10 aa, Severe acute respiratory syndrome coronavirus 2
  REGION 1..10: note = Table B: HLA-DQA1*05:05-B1*03:19L
FNCYFPLQSY

SEQ ID NO: 23308 - protein, 11 aa, Severe acute respiratory syndrome coronavirus 2
  REGION 1..11: note = Table B: HLA-DQA1*05:05-B1*03:19L
QSYGFQPTNGV

SEQ ID NO: 23309 - protein, 17 aa, Severe acute respiratory syndrome coronavirus 2
  REGION 1..17: note = Table B: HLA-DQA1*05:05-B1*03:19L HLA-DRB3*01:01L HLA-DPA1*03:01-B1*105:01L
GPKKSTNLVKNKCVNFN

SEQ ID NO: 23310 - protein, 14 aa, Severe acute respiratory syndrome coronavirus 2
  REGION 1..14: note = Table B: HLA-DQA1*05:05-B1*03:19L HLA-DQA1*05:05-B1*03:01L
TPCSFGGVSVITPG

SEQ ID NO: 23311 - protein, 12 aa, Severe acute respiratory syndrome coronavirus 2
  REGION 1..12: note = Table B: HLA-DQA1*05:05-B1*03:19L HLA-DQA1*05:05-B1*03:01L
SFGGVSVITPGT

SEQ ID NO: 23312 - protein, 10 aa, Severe acute respiratory syndrome coronavirus 2
  REGION 1..10: note = Table B: HLA-DQA1*05:05-B1*03:19L
ADQLTPTWRV

SEQ ID NO: 23313 - protein, 10 aa, Severe acute respiratory syndrome coronavirus 2
  REGION 1..10: note = Table B: HLA-DQA1*05:05-B1*03:19L
TKTSVDCTMY

SEQ ID NO: 23314 - protein, 14 aa, Severe acute respiratory syndrome coronavirus 2
  REGION 1..14: note = Table B: HLA-DQA1*05:05-B1*03:19L HLA-DPA1*01:03-B1*04:01L HLA-DQA1*02:01-B1*03:03L
NLLLQYGSFCTQLN

SEQ ID NO: 23315 - protein, 14 aa, Severe acute respiratory syndrome coronavirus 2
  REGION 1..14: note = Table B: HLA-DQA1*05:05-B1*03:19L
LQYGSFCTQLNRAL

SEQ ID NO: 23316 - protein, 14 aa, Severe acute respiratory syndrome coronavirus 2
  REGION 1..14: note = Table B: HLA-DQA1*05:05-B1*03:19L
LLFNKVTLADAGFI

SEQ ID NO: 23317 - protein, 16 aa, Severe acute respiratory syndrome coronavirus 2
  REGION 1..16: note = Table B: HLA-DQA1*05:05-B1*03:19L
IKQYGDCLGDIAARDL

SEQ ID NO: 23318 - protein, 10 aa, Severe acute respiratory syndrome coronavirus 2
  REGION 1..10: note = Table B: HLA-DQA1*05:05-B1*03:19L
LGDIAARDLI

SEQ ID NO: 23319 - protein, 10 aa, Severe acute respiratory syndrome coronavirus 2
  REGION 1..10: note = Table B: HLA-DQA1*05:05-B1*03:19L
MQMAYRFNGI

SEQ ID NO: 23320 - protein, 11 aa, Severe acute respiratory syndrome coronavirus 2
  REGION 1..11: note = Table B: HLA-DQA1*05:05-B1*03:19L
RFNGIGVTQNV

SEQ ID NO: 23321 - protein, 11 aa, Severe acute respiratory syndrome coronavirus 2
  REGION 1..11: note = Table B: HLA-DQA1*05:05-B1*03:19L HLA-DQA1*01:03-B1*06:01L
DVVNQNAQALN

SEQ ID NO: 23322 - protein, 10 aa, Severe acute respiratory syndrome coronavirus 2
  REGION 1..10: note = Table B: HLA-DQA1*05:05-B1*03:19L
NDILSRLDKV

SEQ ID NO: 23323 - protein, 10 aa, Severe acute respiratory syndrome coronavirus 2
  REGION 1..10: note = Table B: HLA-DQA1*05:05-B1*03:19L
LDKVEAEVQI

SEQ ID NO: 23324 - protein, 11 aa, Severe acute respiratory syndrome coronavirus 2
  REGION 1..11: note = Table B: HLA-DQA1*05:05-B1*03:19L HLA-DQA1*05:01-B1*02:01L
ITGRLQSLQTY

SEQ ID NO: 23325 - protein, 10 aa, Severe acute respiratory syndrome coronavirus 2
  REGION 1..10: note = Table B: HLA-DQA1*05:05-B1*03:19L
TQQLIRAAEI

SEQ ID NO: 23326 - protein, 11 aa, Severe acute respiratory syndrome coronavirus 2
  REGION 1..11: note = Table B: HLA-DQA1*05:05-B1*03:19L
NFTTAPAICHD

SEQ ID NO: 23327 - protein, 10 aa, Severe acute respiratory syndrome coronavirus 2
  REGION 1..10: note = Table B: HLA-DQA1*05:05-B1*03:19L
FVSNGTHWFV

SEQ ID NO: 23328 - protein, 13 aa, Severe acute respiratory syndrome coronavirus 2
  REGION 1..13: note = Table B: HLA-DQA1*05:05-B1*03:19L
TDNTFVSGNCDVV

SEQ ID NO: 23329 - protein, 14 aa, Severe acute respiratory syndrome coronavirus 2
  REGION 1..14: note = Table B: HLA-DQA1*05:05-B1*03:19L HLA-DPA1*03:01-B1*105:01L
FVSGNCDVVIGIVN

SEQ ID NO: 23330 - protein, 11 aa, Severe acute respiratory syndrome coronavirus 2
  REGION 1..11: note = Table B: HLA-DQA1*05:05-B1*03:19L
YDPLQPELDSF

SEQ ID NO: 23331 - protein, 10 aa, Severe acute respiratory syndrome coronavirus 2
  REGION 1..10: note = Table B: HLA-DQA1*05:05-B1*03:19L HLA-DQA1*01:03-B1*06:01L
ASVVNIQKEI

SEQ ID NO: 23332 - protein, 10 aa, Severe acute respiratory syndrome coronavirus 2
  REGION 1..10: note = Table B: HLA-DQA1*05:05-B1*03:19L
QKEIDRLNEV

SEQ ID NO: 23333 - protein, 10 aa, Severe acute respiratory syndrome coronavirus 2
  REGION 1..10: note = Table B: HLA-DQA1*05:05-B1*03:19L HLA-DPA1*02:01-B1*13:01L HLA-DQA1*01:03-B1*06:01L
EQYIKWPWYI

SEQ ID NO: 23334 - protein, 10 aa, Severe acute respiratory syndrome coronavirus 2
  REGION 1..10: note = Table B: HLA-DQA1*05:05-B1*03:19M HLA-DPA1*01:03-B1*104:01L
MDLFMRIFTI

SEQ ID NO: 23335 - protein, 13 aa, Severe acute respiratory syndrome coronavirus 2
  REGION 1..13: note = Table B: HLA-DQA1*05:05-B1*03:19L
IFTIGTVTLKQGE

SEQ ID NO: 23336 - protein, 10 aa, Severe acute respiratory syndrome coronavirus 2
  REGION 1..10: note = Table B: HLA-DQA1*05:05-B1*03:19L
SDFVRATATI

SEQ ID NO: 23337 - protein, 10 aa, Severe acute respiratory syndrome coronavirus 2
  REGION 1..10: note = Table B: HLA-DQA1*05:05-B1*03:19L HLA-DRB1*16:01L HLA-DQA1*02:01-B1*03:03L
LALSKGVHFV

SEQ ID NO: 23338 - protein, 10 aa, Severe acute respiratory syndrome coronavirus 2
  REGION 1..10: note = Table B: HLA-DQA1*05:05-B1*03:19L
VTVYSHLLLV

SEQ ID NO: 23339 - protein, 10 aa, Severe acute respiratory syndrome coronavirus 2
  REGION 1..10: note = Table B: HLA-DQA1*05:05-B1*03:19L
LEAPFLYLYA

SEQ ID NO: 23340 - protein, 10 aa, Severe acute respiratory syndrome coronavirus 2
  REGION 1..10: note = Table B: HLA-DQA1*05:05-B1*03:19L HLA-DPA1*02:01-B1*13:01L HLA-DQA1*01:03-B1*06:01L HLA-DRB1*15:03L
VYFLQSINFV

SEQ ID NO: 23341 - protein, 10 aa, Severe acute respiratory syndrome coronavirus 2
  REGION 1..10: note = Table B: HLA-DQA1*05:05-B1*03:19L
KNPLLYDANY

SEQ ID NO: 23342 - protein, 13 aa, Severe acute respiratory syndrome coronavirus 2
  REGION 1..13: note = Table B: HLA-DQA1*05:05-B1*03:19L
NCYDYCIPYNSVT

SEQ ID NO: 23343 - protein, 13 aa, Severe acute respiratory syndrome coronavirus 2
  REGION 1..13: note = Table B: HLA-DQA1*05:05-B1*03:19L HLA-DQA1*05:05-B1*03:01L
SIVITSGDGTTSP

SEQ ID NO: 23344 - protein, 10 aa, Severe acute respiratory syndrome coronavirus 2
  REGION 1..10: note = Table B: HLA-DQA1*05:05-B1*03:19L HLA-DPA1*01:03-B1*104:01L
WESGVKDCVV

SEQ ID NO: 23345 - protein, 10 aa, Severe acute respiratory syndrome coronavirus 2
  REGION 1..10: note = Table B: HLA-DQA1*05:05-B1*03:19L HLA-DQA1*05:01-B1*02:01L
LHSYFTSDYY

SEQ ID NO: 23346 - protein, 10 aa, Severe acute respiratory syndrome coronavirus 2
  REGION 1..10: note = Table B: HLA-DQA1*05:05-B1*03:19L HLA-DPA1*01:03-B1*104:01L
VDEPEEHVQI

SEQ ID NO: 23347 - protein, 13 aa, Severe acute respiratory syndrome coronavirus 2
  REGION 1..13: note = Table B: HLA-DQA1*05:05-B1*03:19L HLA-DQA1*05:05-B1*03:01L HLA-DQA1*01:03-B1*06:01L
HTIDGSSGVVNPV

SEQ ID NO: 23348 - protein, 11 aa, Severe acute respiratory syndrome coronavirus 2
  REGION 1..11: note = Table B: HLA-DQA1*05:05-B1*03:19L
RINWITGGIAI

SEQ ID NO: 23349 - protein, 11 aa, Severe acute respiratory syndrome coronavirus 2
  REGION 1..11: note = Table B: HLA-DQA1*05:05-B1*03:19L
SMWSFNPETNI

SEQ ID NO: 23350 - protein, 18 aa, Severe acute respiratory syndrome coronavirus 2
  REGION 1..18: note = Table B: HLA-DQA1*05:05-B1*03:19L
IGAVILRGHLRIAGHHLG

SEQ ID NO: 23351 - protein, 10 aa, Severe acute respiratory syndrome coronavirus 2
  REGION 1..10: note = Table B: HLA-DQA1*05:05-B1*03:19L HLA-DRB1*16:01L
IKDLPKEITV

SEQ ID NO: 23352 - protein, 11 aa, Severe acute respiratory syndrome coronavirus 2
  REGION 1..11: note = Table B: HLA-DQA1*05:05-B1*03:19L
NTDHSSSSDNI

SEQ ID NO: 23353 - protein, 10 aa, Severe acute respiratory syndrome coronavirus 2
  REGION 1..10: note = Table B: HLA-DQA1*05:05-B1*03:19L HLA-DPA1*01:03-B1*104:01L
VDFQVTIAEI

SEQ ID NO: 23354 - protein, 19 aa, Severe acute respiratory syndrome coronavirus 2
  REGION 1..19: note = Table B: HLA-DQA1*05:05-B1*03:19L HLA-DRB1*09:01L HLA-DPA1*01:03-B1*104:01L
CPDGVKHVYQLRARSVSPK

SEQ ID NO: 23355 - protein, 19 aa, Severe acute respiratory syndrome coronavirus 2
  REGION 1..19: note = Table B: HLA-DQA1*05:05-B1*03:19L HLA-DPA1*01:03-B1*104:01L
PDGVKHVYQLRARSVSPKL

SEQ ID NO: 23356 - protein, 10 aa, Severe acute respiratory syndrome coronavirus 2
  REGION 1..10: note = Table B: HLA-DQA1*05:05-B1*03:19L HLA-DQA1*05:01-B1*02:01L
MIELSLIDFY

SEQ ID NO: 23357 - protein, 10 aa, Severe acute respiratory syndrome coronavirus 2
  REGION 1..10: note = Table B: HLA-DQA1*05:05-B1*03:19L
LELQDHNETC

SEQ ID NO: 23358 - protein, 15 aa, Severe acute respiratory syndrome coronavirus 2
  REGION 1..15: note = Table B: HLA-DQA1*05:05-B1*03:19L HLA-DQA1*01:03-B1*06:01L
VAAFHQECSLQSCTQ

SEQ ID NO: 23359 - protein, 11 aa, Severe acute respiratory syndrome coronavirus 2
  REGION 1..11: note = Table B: HLA-DQA1*05:05-B1*03:19L
RCSFYEDFLEY

SEQ ID NO: 23360 - protein, 13 aa, Severe acute respiratory syndrome coronavirus 2
  REGION 1..13: note = Table B: HLA-DQA1*05:05-B1*03:19L HLA-DQA1*05:05-B1*03:01L
PRITFGGPSDSTG

SEQ ID NO: 23361 - protein, 10 aa, Severe acute respiratory syndrome coronavirus 2
  REGION 1..10: note = Table B: HLA-DQA1*05:05-B1*03:19L
MKDLSPRWYF

SEQ ID NO: 23362 - protein, 12 aa, Severe acute respiratory syndrome coronavirus 2
  REGION 1..12: note = Table B: HLA-DQA1*05:05-B1*03:19L HLA-DQA1*05:05-B1*03:01L
YYLGTGPEAGLP

SEQ ID NO: 23363 - protein, 13 aa, Severe acute respiratory syndrome coronavirus 2
  REGION 1..13: note = Table B: HLA-DQA1*05:05-B1*03:19L HLA-DQA1*05:05-B1*03:01L HLA-DQA1*01:03-B1*06:01L
MAGNGGDAALALL

SEQ ID NO: 23364 - protein, 15 aa, Severe acute respiratory syndrome coronavirus 2
  REGION 1..15: note = Table B: HLA-DQA1*05:05-B1*03:19L HLA-DQA1*05:05-B1*03:01L HLA-DQA1*01:03-B1*06:01L
LESKMSGKGQQQQGQ

SEQ ID NO: 23365 - protein, 14 aa, Severe acute respiratory syndrome coronavirus 2
  REGION 1..14: note = Table B: HLA-DQA1*05:05-B1*03:19L HLA-DQA1*05:05-B1*03:01L
YNVTQAFGRRGPEQ

SEQ ID NO: 23366 - protein, 10 aa, Severe acute respiratory syndrome coronavirus 2
  REGION 1..10: note = Table B: HLA-DQA1*05:05-B1*03:19L HLA-DPA1*01:03-B1*104:01L
GTDYKHWPQI

SEQ ID NO: 23367 - protein, 14 aa, Severe acute respiratory syndrome coronavirus 2
  REGION 1..14: note = Table B: HLA-DQA1*05:05-B1*03:19L
FGMSRIGMEVTPSG

SEQ ID NO: 23368 - protein, 13 aa, Severe acute respiratory syndrome coronavirus 2
  REGION 1..13: note = Table B: HLA-DQA1*05:05-B1*03:19L HLA-DQA1*05:05-B1*03:01L HLA-DRB1*15:03L
DLDDFSKQLQQSM

SEQ ID NO: 23369 - protein, 11 aa, Severe acute respiratory syndrome coronavirus 2
  REGION 1..11: note = Table B: HLA-DQA1*05:05-B1*03:19L
YINVFAFPFTI

SEQ ID NO: 23370 - protein, 12 aa, Severe acute respiratory syndrome coronavirus 2
  REGION 1..12: note = Table B: HLA-DRB4*02:01NL HLA-DPA1*01:03-B1*02:01L
AGIFGADPIHSL

SEQ ID NO: 23371 - protein, 14 aa, Severe acute respiratory syndrome coronavirus 2
  REGION 1..14: note = Table B: HLA-DRB4*02:01NL HLA-DRB1*13:01L HLA-DPA1*01:03-B1*02:01L HLA-DRB1*08:02L HLA-DRB1*15:01L
LNGYTVEEAKTVLK

SEQ ID NO: 23372 - protein, 15 aa, Severe acute respiratory syndrome coronavirus 2
  REGION 1..15: note = Table B: HLA-DRB4*02:01NL
GARFYFYTSKTTVAS

SEQ ID NO: 23373 - protein, 14 aa, Severe acute respiratory syndrome coronavirus 2
  REGION 1..14: note = Table B: HLA-DRB4*02:01NL HLA-DQA1*05:05-B1*03:116L
NINLHTQVVDMSMT

SEQ ID NO: 23374 - protein, 12 aa, Severe acute respiratory syndrome coronavirus 2
  REGION 1..12: note = Table B: HLA-DRB4*02:01NL HLA-DRB4*01:01L HLA-DRB1*15:01L
AAYVDNSSLTIK

SEQ ID NO: 23375 - protein, 14 aa, Severe acute respiratory syndrome coronavirus 2
  REGION 1..14: note = Table B: HLA-DRB4*02:01NL HLA-DRB1*13:01L HLA-DRB4*01:01L HLA-DRB1*15:01L
AYVDNSSLTIKKPN

SEQ ID NO: 23376 - protein, 13 aa, Severe acute respiratory syndrome coronavirus 2
  REGION 1..13: note = Table B: HLA-DRB4*02:01NL HLA-DRB1*07:01L HLA-DRB1*15:01L
VYAADPAMHAASG

SEQ ID NO: 23377 - protein, 12 aa, Severe acute respiratory syndrome coronavirus 2
  REGION 1..12: note = Table B: HLA-DRB4*02:01NL HLA-DRB3*01:01L
NALLSTDGNKIA

SEQ ID NO: 23378 - protein, 15 aa, Severe acute respiratory syndrome coronavirus 2
  REGION 1..15: note = Table B: HLA-DRB4*02:01NL
VASKILGLPTQTVDS

SEQ ID NO: 23379 - protein, 15 aa, Severe acute respiratory syndrome coronavirus 2
  REGION 1..15: note = Table B: HLA-DRB4*02:01NL HLA-DRB1*13:01L HLA-DPA1*01:03-B1*02:01L HLA-DRB1*15:01L
GVLITEGSVKGLQPS

SEQ ID NO: 23380 - protein, 15 aa, Severe acute respiratory syndrome coronavirus 2
  REGION 1..15: note = Table B: HLA-DRB4*02:01NL HLA-DPA1*01:03-B1*04:01L HLA-DRB1*15:01L
SFVIRGDEVRQIAPG

SEQ ID NO: 23381 - protein, 14 aa, Severe acute respiratory syndrome coronavirus 2
  REGION 1..14: note = Table B: HLA-DRB4*02:01NL HLA-DPA1*01:03-B1*02:01L HLA-DRB1*08:02L HLA-DRB1*15:01L
LKPFERDISTEIYQ

SEQ ID NO: 23382 - protein, 16 aa, Severe acute respiratory syndrome coronavirus 2
  REGION 1..16: note = Table B: HLA-DRB4*02:01NL
GGFNFSQILPDPSKPS

SEQ ID NO: 23383 - protein, 15 aa, Severe acute respiratory syndrome coronavirus 2
  REGION 1..15: note = Table B: HLA-DRB4*02:01NL HLA-DQA1*05:05-B1*03:116L HLA-DRB1*15:01L
IEDLLFNKVTLADAG

SEQ ID NO: 23384 - protein, 13 aa, Severe acute respiratory syndrome coronavirus 2
  REGION 1..13: note = Table B: HLA-DRB4*02:01NL
IDGSSGVVNPVME

SEQ ID NO: 23385 - protein, 14 aa, Severe acute respiratory syndrome coronavirus 2
  REGION 1..14: note = Table B: HLA-DRB4*02:01NL
SRNYIAQVDVVNFN

SEQ ID NO: 23386 - protein, 15 aa, Severe acute respiratory syndrome coronavirus 2
  REGION 1..15: note = Table B: HLA-DRB5*02:02L
SDDYIATNGPLKVGG

SEQ ID NO: 23387 - protein, 15 aa, Severe acute respiratory syndrome coronavirus 2
  REGION 1..15: note = Table B: HLA-DRB5*02:02L
AGSTFISDEVARDLS

SEQ ID NO: 23388 - protein, 13 aa, Severe acute respiratory syndrome coronavirus 2
  REGION 1..13: note = Table B: HLA-DRB5*02:02L
VSDVGDSAEVAVK

SEQ ID NO: 23389 - protein, 16 aa, Severe acute respiratory syndrome coronavirus 2
  REGION 1..16: note = Table B: HLA-DRB5*02:02L HLA-DRB1*15:01L
IQQVVDADSKIVQLSE

SEQ ID NO: 23390 - protein, 18 aa, Severe acute respiratory syndrome coronavirus 2
  REGION 1..18: note = Table B: HLA-DRB5*02:02L
DFGDFIQTTPGSGVPVVD

SEQ ID NO: 23391 - protein, 14 aa, Severe acute respiratory syndrome coronavirus 2
  REGION 1..14: note = Table B: HLA-DRB5*02:02L
ISDEFSSNVANYQK

SEQ ID NO: 23392 - protein, 15 aa, Severe acute respiratory syndrome coronavirus 2
  REGION 1..15: note = Table B: HLA-DRB5*02:02L HLA-DQA1*05:05-B1*03:116L
EPQIITTDNTFVSGN

SEQ ID NO: 23393 - protein, 14 aa, Severe acute respiratory syndrome coronavirus 2
  REGION 1..14: note = Table B: HLA-DRB5*02:02L
PSDFVRATATIPIQ

SEQ ID NO: 23394 - protein, 14 aa, Severe acute respiratory syndrome coronavirus 2
  REGION 1..14: note = Table B: HLA-DRB5*02:02L
DFVRATATIPIQAS

SEQ ID NO: 23395 - protein, 16 aa, Severe acute respiratory syndrome coronavirus 2
  REGION 1..16: note = Table B: HLA-DRB5*02:02L HLA-DQA1*05:05-B1*03:116L
TGAIKLDDKDPNFKDQ

SEQ ID NO: 23396 - protein, 11 aa, Severe acute respiratory syndrome coronavirus 2
  REGION 1..11: note = Table B: HLA-DQA1*05:01-B1*02:01L HLA-DQA1*01:03-B1*06:01L
VELVAELEGIQ

SEQ ID NO: 23397 - protein, 11 aa, Severe acute respiratory syndrome coronavirus 2
  REGION 1..11: note = Table B: HLA-DQA1*05:01-B1*02:01L HLA-DRB1*16:01L HLA-DQA1*01:03-B1*06:01L HLA-DQA1*02:01-B1*03:03L
ADLKSFDLGDE

SEQ ID NO: 23398 - protein, 12 aa, Severe acute respiratory syndrome coronavirus 2
  REGION 1..12: note = Table B: HLA-DQA1*05:01-B1*02:01L
DLKSFDLGDELG

SEQ ID NO: 23399 - protein, 14 aa, Severe acute respiratory syndrome coronavirus 2
  REGION 1..14: note = Table B: HLA-DQA1*05:01-B1*02:01L
LKSFDLGDELGTDP

SEQ ID NO: 23400 - protein, 11 aa, Severe acute respiratory syndrome coronavirus 2
  REGION 1..11: note = Table B: HLA-DQA1*05:01-B1*02:01L HLA-DQA1*03:01-B1*03:02L
GDELGTDPYED

SEQ ID NO: 23401 - protein, 11 aa, Severe acute respiratory syndrome coronavirus 2
  REGION 1..11: note = Table B: HLA-DQA1*05:01-B1*02:01L
DPYEDFQENWN

SEQ ID NO: 23402 - protein, 11 aa, Severe acute respiratory syndrome coronavirus 2
  REGION 1..11: note = Table B: HLA-DQA1*05:01-B1*02:01L HLA-DRB1*12:01L HLA-DPA1*03:01-B1*105:01L
GAYTRYVDNNF

SEQ ID NO: 23403 - protein, 12 aa, Severe acute respiratory syndrome coronavirus 2
  REGION 1..12: note = Table B: HLA-DQA1*05:01-B1*02:01L
FDTFNGECPNFV

SEQ ID NO: 23404 - protein, 12 aa, Severe acute respiratory syndrome coronavirus 2
  REGION 1..12: note = Table B: HLA-DQA1*05:01-B1*02:01L HLA-DPA1*03:01-B1*105:01L
HTGVVGEGSEGL

SEQ ID NO: 23405 - protein, 11 aa, Severe acute respiratory syndrome coronavirus 2
  REGION 1..11: note = Table B: HLA-DQA1*05:01-B1*02:01L
GVVGEGSEGLN

SEQ ID NO: 23406 - protein, 12 aa, Severe acute respiratory syndrome coronavirus 2
  REGION 1..12: note = Table B: HLA-DQA1*05:01-B1*02:01L
VGEGSEGLNDNL

SEQ ID NO: 23407 - protein, 11 aa, Severe acute respiratory syndrome coronavirus 2
  REGION 1..11: note = Table B: HLA-DQA1*05:01-B1*02:01L HLA-DQA1*03:01-B1*03:02L
EGSEGLNDNLL

SEQ ID NO: 23408 - protein, 11 aa, Severe acute respiratory syndrome coronavirus 2
  REGION 1..11: note = Table B: HLA-DQA1*05:01-B1*02:01L
GSEGLNDNLLE

SEQ ID NO: 23409 - protein, 12 aa, Severe acute respiratory syndrome coronavirus 2
  REGION 1..12: note = Table B: HLA-DQA1*05:01-B1*02:01L
SEGLNDNLLEIL

SEQ ID NO: 23410 - protein, 11 aa, Severe acute respiratory syndrome coronavirus 2
  REGION 1..11: note = Table B: HLA-DQA1*05:01-B1*02:01L HLA-DPA1*03:01-B1*105:01L
SQYSLRLIDAM

SEQ ID NO: 23411 - protein, 10 aa, Severe acute respiratory syndrome coronavirus 2
  REGION 1..10: note = Table B: HLA-DQA1*05:01-B1*02:01L HLA-DPA1*03:01-B1*105:01L HLA-DQA1*03:01-B1*03:02L HLA-DQA1*01:03-B1*06:01L HLA-DQA1*02:01-B1*03:03L
MFTSDLATNN

SEQ ID NO: 23412 - protein, 12 aa, Severe acute respiratory syndrome coronavirus 2
  REGION 1..12: note = Table B: HLA-DQA1*05:01-B1*02:01L HLA-DPA1*03:01-B1*105:01L
GLLMPLKAPKEI

SEQ ID NO: 23413 - protein, 12 aa, Severe acute respiratory syndrome coronavirus 2
  REGION 1..12: note = Table B: HLA-DQA1*05:01-B1*02:01L HLA-DPA1*03:01-B1*105:01L
IFLEGETLPTEV

SEQ ID NO: 23414 - protein, 12 aa, Severe acute respiratory syndrome coronavirus 2
  REGION 1..12: note = Table B: HLA-DQA1*05:01-B1*02:01L
ETLPTEVLTEEV

SEQ ID NO: 23415 - protein, 12 aa, Severe acute respiratory syndrome coronavirus 2
  REGION 1..12: note = Table B: HLA-DQA1*05:01-B1*02:01L
APTKVTFGDDTV

SEQ ID NO: 23416 - protein, 11 aa, Severe acute respiratory syndrome coronavirus 2
  REGION 1..11: note = Table B: HLA-DQA1*05:01-B1*02:01L HLA-DQA1*03:01-B1*03:02L
FGDDTVIEVQG

SEQ ID NO: 23417 - protein, 11 aa, Severe acute respiratory syndrome coronavirus 2
  REGION 1..11: note = Table B: HLA-DQA1*05:01-B1*02:01L HLA-DRB1*12:01L HLA-DRB1*14:17L
EVQGYKSVNIT

SEQ ID NO: 23418 - protein, 11 aa, Severe acute respiratory syndrome coronavirus 2
  REGION 1..11: note = Table B: HLA-DQA1*05:01-B1*02:01L HLA-DPA1*03:01-B1*105:01L HLA-DQA1*02:01-B1*03:03L
AYTVELGTEVN

SEQ ID NO: 23419 - protein, 12 aa, Severe acute respiratory syndrome coronavirus 2
  REGION 1..12: note = Table B: HLA-DQA1*05:01-B1*02:01L HLA-DQA1*03:01-B1*03:02L
SFYPPDEDEEEG

SEQ ID NO: 23420 - protein, 15 aa, Severe acute respiratory syndrome coronavirus 2
  REGION 1..15: note = Table B: HLA-DQA1*05:01-B1*02:01L HLA-DQA1*03:01-B1*03:02L
YPPDEDEEEGDCEEE

SEQ ID NO: 23421 - protein, 17 aa, Severe acute respiratory syndrome coronavirus 2
  REGION 1..17: note = Table B: HLA-DQA1*05:01-B1*02:01L
PPDEDEEEGDCEEEEFE

SEQ ID NO: 23422 - protein, 14 aa, Severe acute respiratory syndrome coronavirus 2
  REGION 1..14: note = Table B: HLA-DQA1*05:01-B1*02:01L
DEEEGDCEEEEFEP

SEQ ID NO: 23423 - protein, 13 aa, Severe acute respiratory syndrome coronavirus 2
  REGION 1..13: note = Table B: HLA-DQA1*05:01-B1*02:01L
EEGDCEEEEFEPS

SEQ ID NO: 23424 - protein, 14 aa, Severe acute respiratory syndrome coronavirus 2
  REGION 1..14: note = Table B: HLA-DQA1*05:01-B1*02:01L
EGDCEEEEFEPSTQ

SEQ ID NO: 23425 - protein, 12 aa, Severe acute respiratory syndrome coronavirus 2
  REGION 1..12: note = Table B: HLA-DQA1*05:01-B1*02:01L HLA-DQA1*03:01-B1*03:02L
FEPSTQYEYGTE

SEQ ID NO: 23426 - protein, 10 aa, Severe acute respiratory syndrome coronavirus 2
  REGION 1..10: note = Table B: HLA-DQA1*05:01-B1*02:01L HLA-DQA1*03:01-B1*03:02L
AALQPEEEQE

SEQ ID NO: 23427 - protein, 10 aa, Severe acute respiratory syndrome coronavirus 2
  REGION 1..10: note = Table B: HLA-DQA1*05:01-B1*02:01L HLA-DQA1*03:01-B1*03:02L
ALQPEEEQEE

SEQ ID NO: 23428 - protein, 14 aa, Severe acute respiratory syndrome coronavirus 2
  REGION 1..14: note = Table B: HLA-DQA1*05:01-B1*02:01L
PEEEQEEDWLDDDS

SEQ ID NO: 23429 - protein, 12 aa, Severe acute respiratory syndrome coronavirus 2
  REGION 1..12: note = Table B: HLA-DQA1*05:01-B1*02:01L
EQEEDWLDDDSQ

SEQ ID NO: 23430 - protein, 12 aa, Severe acute respiratory syndrome coronavirus 2
  REGION 1..12: note = Table B: HLA-DQA1*05:01-B1*02:01L
QEEDWLDDDSQQ

SEQ ID NO: 23431 - protein, 12 aa, Severe acute respiratory syndrome coronavirus 2
  REGION 1..12: note = Table B: HLA-DQA1*05:01-B1*02:01L HLA-DQA1*03:01-B1*03:02L
EEDWLDDDSQQT

SEQ ID NO: 23432 - protein, 13 aa, Severe acute respiratory syndrome coronavirus 2
  REGION 1..13: note = Table B: HLA-DQA1*05:01-B1*02:01L
LDDDSQQTVGQQD

SEQ ID NO: 23433 - protein, 12 aa, Severe acute respiratory syndrome coronavirus 2
  REGION 1..12: note = Table B: HLA-DQA1*05:01-B1*02:01L HLA-DQA1*03:01-B1*03:02L HLA-DQA1*01:03-B1*06:01L
TDNVYIKNADIV

SEQ ID NO: 23434 - protein, 12 aa, Severe acute respiratory syndrome coronavirus 2
  REGION 1..12: note = Table B: HLA-DQA1*05:01-B1*02:01L
VESDDYIATNGP

SEQ ID NO: 23435 - protein, 11 aa, Severe acute respiratory syndrome coronavirus 2
  REGION 1..11: note = Table B: HLA-DQA1*05:01-B1*02:01L
SATLVSDIDIT

SEQ ID NO: 23436 - protein, 11 aa, Severe acute respiratory syndrome coronavirus 2
  REGION 1..11: note = Table B: HLA-DQA1*05:01-B1*02:01L HLA-DPA1*03:01-B1*105:01L
LVSDIDITFLK

SEQ ID NO: 23437 - protein, 12 aa, Severe acute respiratory syndrome coronavirus 2
  REGION 1..12: note = Table B: HLA-DQA1*05:01-B1*02:01L HLA-DPA1*03:01-B1*105:01L
PYIVGDVVQEGV

SEQ ID NO: 23438 - protein, 13 aa, Severe acute respiratory syndrome coronavirus 2
  REGION 1..13: note = Table B: HLA-DQA1*05:01-B1*02:01L HLA-DQA1*03:01-B1*03:02L HLA-DQA1*01:03-B1*06:01L
NDLNETLVTMPLG

SEQ ID NO: 23439 - protein, 11 aa, Severe acute respiratory syndrome coronavirus 2
  REGION 1..11: note = Table B: HLA-DQA1*05:01-B1*02:01L
TVSVSSPDAVT

SEQ ID NO: 23440 - protein, 11 aa, Severe acute respiratory syndrome coronavirus 2
  REGION 1..11: note = Table B: HLA-DQA1*05:01-B1*02:01L
TPEEHFIETIS

SEQ ID NO: 23441 - protein, 12 aa, Severe acute respiratory syndrome coronavirus 2
  REGION 1..12: note = Table B: HLA-DQA1*05:01-B1*02:01L HLA-DQA1*05:05-B1*03:01L HLA-DQA1*01:03-B1*06:01L
DWSYSGQSTQLG

SEQ ID NO: 23442 - protein, 12 aa, Severe acute respiratory syndrome coronavirus 2
  REGION 1..12: note = Table B: HLA-DQA1*05:01-B1*02:01L HLA-DQA1*03:01-B1*03:02L
SNPTTFHLDGEV

SEQ ID NO: 23443 - protein, 12 aa, Severe acute respiratory syndrome coronavirus 2
  REGION 1..12: note = Table B: HLA-DQA1*05:01-B1*02:01L HLA-DQA1*03:01-B1*03:02L
NPTTFHLDGEVI

SEQ ID NO: 23444 - protein, 13 aa, Severe acute respiratory syndrome coronavirus 2
  REGION 1..13: note = Table B: HLA-DQA1*05:01-B1*02:01L HLA-DPA1*03:01-B1*105:01L
LDGVVCTEIDPKL

SEQ ID NO: 23445 - protein, 11 aa, Severe acute respiratory syndrome coronavirus 2
  REGION 1..11: note = Table B: HLA-DQA1*05:01-B1*02:01L HLA-DPA1*01:03-B1*04:02L HLA-DRB1*16:01L
ELKVTFFPDLN

SEQ ID NO: 23446 - protein, 12 aa, Severe acute respiratory syndrome coronavirus 2
  REGION 1..12: note = Table B: HLA-DQA1*05:01-B1*02:01L HLA-DQA1*03:01-B1*03:02L
FPDLNGDVVAID

SEQ ID NO: 23447 - protein, 11 aa, Severe acute respiratory syndrome coronavirus 2
  REGION 1..11: note = Table B: HLA-DQA1*05:01-B1*02:01L
SEEVVENPTIQ

SEQ ID NO: 23448 - protein, 12 aa, Severe acute respiratory syndrome coronavirus 2
  REGION 1..12: note = Table B: HLA-DQA1*05:01-B1*02:01L
LAAVNSVPWDTI

SEQ ID NO: 23449 - protein, 11 aa, Severe acute respiratory syndrome coronavirus 2
  REGION 1..11: note = Table B: HLA-DQA1*05:01-B1*02:01L
DSVTVKNGSIH

SEQ ID NO: 23450 - protein, 12 aa, Severe acute respiratory syndrome coronavirus 2
  REGION 1..12: note = Table B: HLA-DQA1*05:01-B1*02:01L HLA-DQA1*03:01-B1*03:02L HLA-DQA1*01:03-B1*06:01L
NVKDFMSLSEQL

SEQ ID NO: 23451 - protein, 10 aa, Severe acute respiratory syndrome coronavirus 2
  REGION 1..10: note = Table B: HLA-DQA1*05:01-B1*02:01L HLA-DRB1*12:01L HLA-DRB1*16:01L HLA-DQA1*02:01-B1*03:03L HLA-DRB1*15:03L
ICYTPSKLIE

SEQ ID NO: 23452 - protein, 11 aa, Severe acute respiratory syndrome coronavirus 2
  REGION 1..11: note = Table B: HLA-DQA1*05:01-B1*02:01L HLA-DPA1*03:01-B1*105:01L HLA-DRB1*15:03L
LPGVYSVIYLY

SEQ ID NO: 23453 - protein, 13 aa, Severe acute respiratory syndrome coronavirus 2
  REGION 1..13: note = Table B: HLA-DQA1*05:01-B1*02:01L
TTTLNGLWLDDVV

SEQ ID NO: 23454 - protein, 12 aa, Severe acute respiratory syndrome coronavirus 2
  REGION 1..12: note = Table B: HLA-DQA1*05:01-B1*02:01L HLA-DQA1*01:03-B1*06:01L
DLEGNFYGPFVD

SEQ ID NO: 23455 - protein, 12 aa, Severe acute respiratory syndrome coronavirus 2
  REGION 1..12: note = Table B: HLA-DQA1*05:01-B1*02:01L HLA-DPA1*03:01-B1*105:01L HLA-DRB1*15:03L
NFYGPFVDRQTA

SEQ ID NO: 23456 - protein, 13 aa, Severe acute respiratory syndrome coronavirus 2
  REGION 1..13: note = Table B: HLA-DQA1*05:01-B1*02:01L
PLTQDHVDILGPL

SEQ ID NO: 23457 - protein, 11 aa, Severe acute respiratory syndrome coronavirus 2
  REGION 1..11: note = Table B: HLA-DQA1*05:01-B1*02:01L HLA-DRB4*01:01L HLA-DRB1*12:01L HLA-DQA1*02:01-B1*03:03L
SLLVLVQSTQW

SEQ ID NO: 23458 - protein, 10 aa, Severe acute respiratory syndrome coronavirus 2
  REGION 1..10: note = Table B: HLA-DQA1*05:01-B1*02:01L HLA-DRB1*12:01L HLA-DRB1*15:03L
GIIAMSAFAM

SEQ ID NO: 23459 - protein, 13 aa, Severe acute respiratory syndrome coronavirus 2
  REGION 1..13: note = Table B: HLA-DQA1*05:01-B1*02:01L HLA-DPA1*01:03-B1*04:02L HLA-DRB1*15:03L
VAYFNMVYMPASW

SEQ ID NO: 23460 - protein, 13 aa, Severe acute respiratory syndrome coronavirus 2
  REGION 1..13: note = Table B: HLA-DQA1*05:01-B1*02:01L
FNMVYMPASWVMR

SEQ ID NO: 23461 - protein, 12 aa, Severe acute respiratory syndrome coronavirus 2
  REGION 1..12: note = Table B: HLA-DQA1*05:01-B1*02:01L HLA-DPA1*03:01-B1*105:01L
QQLRVESSSKLW

SEQ ID NO: 23462 - protein, 11 aa, Severe acute respiratory syndrome coronavirus 2
  REGION 1..11: note = Table B: HLA-DQA1*05:01-B1*02:01L HLA-DQA1*01:03-B1*06:01L
AKDTTEAFEKM

SEQ ID NO: 23463 - protein, 13 aa, Severe acute respiratory syndrome coronavirus 2
  REGION 1..13: note = Table B: HLA-DQA1*05:01-B1*02:01L HLA-DRB1*12:01L
GAVDINKLCEEML

SEQ ID NO: 23464 - protein, 11 aa, Severe acute respiratory syndrome coronavirus 2
  REGION 1..11: note = Table B: HLA-DQA1*05:01-B1*02:01L HLA-DPA1*01:02-B1*04:01L
VVIPDYNTYKN

SEQ ID NO: 23465 - protein, 10 aa, Severe acute respiratory syndrome coronavirus 2
  REGION 1..10: note = Table B: HLA-DQA1*05:01-B1*02:01L HLA-DRB1*12:01L HLA-DRB1*15:03L
IVQLSEISMD

SEQ ID NO: 23466 - protein, 11 aa, Severe acute respiratory syndrome coronavirus 2
  REGION 1..11: note = Table B: HLA-DQA1*05:01-B1*02:01L
EISMDNSPNLA

SEQ ID NO: 23467 - protein, 11 aa, Severe acute respiratory syndrome coronavirus 2
  REGION 1..11: note = Table B: HLA-DQA1*05:01-B1*02:01L
LQNNELSPVAL

SEQ ID NO: 23468 - protein, 10 aa, Severe acute respiratory syndrome coronavirus 2
  REGION 1..10: note = Table B: HLA-DQA1*05:01-B1*02:01L HLA-DQA1*03:01-B1*03:02L
AITVTPEANM

SEQ ID NO: 23469 - protein, 16 aa, Severe acute respiratory syndrome coronavirus 2
  REGION 1..16: note = Table B: HLA-DQA1*05:01-B1*02:01L HLA-DPA1*01:03-B1*04:01L
IDSYFVVKRHTFSNYQ

SEQ ID NO: 23470 - protein, 18 aa, Severe acute respiratory syndrome coronavirus 2
  REGION 1..18: note = Table B: HLA-DQA1*05:01-B1*02:01L HLA-DPA1*01:03-B1*104:01L
DSYFVVKRHTFSNYQHEE

SEQ ID NO: 23471 - protein, 16 aa, Severe acute respiratory syndrome coronavirus 2
  REGION 1..16: note = Table B: HLA-DQA1*05:01-B1*02:01L
FVVKRHTFSNYQHEET

SEQ ID NO: 23472 - protein, 17 aa, Severe acute respiratory syndrome coronavirus 2
  REGION 1..17: note = Table B: HLA-DQA1*05:01-B1*02:01L
IYNLLKDCPAVAKHDFF

SEQ ID NO: 23473 - protein, 11 aa, Severe acute respiratory syndrome coronavirus 2
  REGION 1..11: note = Table B: HLA-DQA1*05:01-B1*02:01L HLA-DQA1*03:01-B1*03:02L
KDWYDFVENPD

SEQ ID NO: 23474 - protein, 11 aa, Severe acute respiratory syndrome coronavirus 2
  REGION 1..11: note = Table B: HLA-DQA1*05:01-B1*02:01L
DWYDFVENPDI

SEQ ID NO: 23475 - protein, 14 aa, Severe acute respiratory syndrome coronavirus 2
  REGION 1..14: note = Table B: HLA-DQA1*05:01-B1*02:01L
NQDLNGNWYDFGDF

SEQ ID NO: 23476 - protein, 12 aa, Severe acute respiratory syndrome coronavirus 2
  REGION 1..12: note = Table B: HLA-DQA1*05:01-B1*02:01L
NGNWYDFGDFIQ

SEQ ID NO: 23477 - protein, 13 aa, Severe acute respiratory syndrome coronavirus 2
  REGION 1..13: note = Table B: HLA-DQA1*05:01-B1*02:01L HLA-DRB1*12:01L HLA-DRB1*15:03L
TLTRALTAESHVD

SEQ ID NO: 23478 - protein, 10 aa, Severe acute respiratory syndrome coronavirus 2
  REGION 1..10: note = Table B: HLA-DQA1*05:01-B1*02:01L HLA-DQA1*03:01-B1*03:02L HLA-DQA1*01:03-B1*06:01L HLA-DQA1*02:01-B1*03:03L
LTAESHVDTD

SEQ ID NO: 23479 - protein, 11 aa, Severe acute respiratory syndrome coronavirus 2
  REGION 1..11: note = Table B: HLA-DQA1*05:01-B1*02:01L
TAESHVDTDLT

SEQ ID NO: 23480 - protein, 15 aa, Severe acute respiratory syndrome coronavirus 2
  REGION 1..15: note = Table B: HLA-DQA1*05:01-B1*02:01L
KPYIKWDLLKYDFTE

SEQ ID NO: 23481 - protein, 11 aa, Severe acute respiratory syndrome coronavirus 2
  REGION 1..11: note = Table B: HLA-DQA1*05:01-B1*02:01L HLA-DPA1*01:03-B1*04:02L
GFFKEGSSVEL

SEQ ID NO: 23482 - protein, 11 aa, Severe acute respiratory syndrome coronavirus 2
  REGION 1..11: note = Table B: HLA-DQA1*05:01-B1*02:01L
YDYYRYNLPTM

SEQ ID NO: 23483 - protein, 11 aa, Severe acute respiratory syndrome coronavirus 2
  REGION 1..11: note = Table B: HLA-DQA1*05:01-B1*02:01L HLA-DQA1*01:03-B1*06:01L
NANQVIVNNLD

SEQ ID NO: 23484 - protein, 12 aa, Severe acute respiratory syndrome coronavirus 2
  REGION 1..12: note = Table B: HLA-DQA1*05:01-B1*02:01L HLA-DPA1*03:01-B1*105:01L
LYYDSMSYEDQD

SEQ ID NO: 23485 - protein, 11 aa, Severe acute respiratory syndrome coronavirus 2
  REGION 1..11: note = Table B: HLA-DQA1*05:01-B1*02:01L
YDSMSYEDQDA

SEQ ID NO: 23486 - protein, 14 aa, Severe acute respiratory syndrome coronavirus 2
  REGION 1..14: note = Table B: HLA-DQA1*05:01-B1*02:01L
VKPGGTSSGDATTA

SEQ ID NO: 23487 - protein, 17 aa, Severe acute respiratory syndrome coronavirus 2
  REGION 1..17: note = Table B: HLA-DQA1*05:01-B1*02:01L HLA-DPA1*01:03-B1*04:01L
GPHEFCSQHTMLVKQGD

SEQ ID NO: 23488 - protein, 14 aa, Severe acute respiratory syndrome coronavirus 2
  REGION 1..14: note = Table B: HLA-DQA1*05:01-B1*02:01L HLA-DRB1*16:01L HLA-DRB1*15:03L
GAGCFVDDIVKTDG

SEQ ID NO: 23489 - protein, 17 aa, Severe acute respiratory syndrome coronavirus 2
  REGION 1..17: note = Table B: HLA-DQA1*05:01-B1*02:01L HLA-DPA1*01:03-B1*04:02L HLA-DPA1*01:03-B1*104:01L
DHVISTSHKLVLSVNPY

SEQ ID NO: 23490 - protein, 11 aa, Severe acute respiratory syndrome coronavirus 2
  REGION 1..11: note = Table B: HLA-DQA1*05:01-B1*02:01L
VDALCEKALKY

SEQ ID NO: 23491 - protein, 12 aa, Severe acute respiratory syndrome coronavirus 2
  REGION 1..12: note = Table B: HLA-DQA1*05:01-B1*02:01L HLA-DQA1*01:03-B1*06:01L
TVNALPETTADI

SEQ ID NO: 23492 - protein, 12 aa, Severe acute respiratory syndrome coronavirus 2
  REGION 1..12: note = Table B: HLA-DQA1*05:01-B1*02:01L HLA-DQA1*03:01-B1*03:02L HLA-DQA1*02:01-B1*03:03L
TTADIVVFDEIS

SEQ ID NO: 23493 - protein, 11 aa, Severe acute respiratory syndrome coronavirus 2
  REGION 1..11: note = Table B: HLA-DQA1*05:01-B1*02:01L
TVSALVYDNKL

SEQ ID NO: 23494 - protein, 13 aa, Severe acute respiratory syndrome coronavirus 2
  REGION 1..13: note = Table B: HLA-DQA1*05:01-B1*02:01L HLA-DRB1*14:17L
FSTGVNLVAVPTG

SEQ ID NO: 23495 - protein, 12 aa, Severe acute respiratory syndrome coronavirus 2
  REGION 1..12: note = Table B: HLA-DQA1*05:01-B1*02:01L
PTGYVDTPNNTD

SEQ ID NO: 23496 - protein, 12 aa, Severe acute respiratory syndrome coronavirus 2
  REGION 1..12: note = Table B: HLA-DQA1*05:01-B1*02:01L
DTPNNTDFSRVS

SEQ ID NO: 23497 - protein, 17 aa, Severe acute respiratory syndrome coronavirus 2
  REGION 1..17: note = Table B: HLA-DQA1*05:01-B1*02:01L
GGSLYVNKHAFHTPAFD

SEQ ID NO: 23498 - protein, 12 aa, Severe acute respiratory syndrome coronavirus 2
  REGION 1..12: note = Table B: HLA-DQA1*05:01-B1*02:01L
TVFFDGRVDGQV

SEQ ID NO: 23499 - protein, 12 aa, Severe acute respiratory syndrome coronavirus 2
  REGION 1..12: note = Table B: HLA-DQA1*05:01-B1*02:01L
DSDLNDFVSDAD

SEQ ID NO: 23500 - protein, 12 aa, Severe acute respiratory syndrome coronavirus 2
  REGION 1..12: note = Table B: HLA-DQA1*05:01-B1*02:01L HLA-DQA1*03:01-B1*03:02L
DLNDFVSDADST

SEQ ID NO: 23501 - protein, 11 aa, Severe acute respiratory syndrome coronavirus 2
  REGION 1..11: note = Table B: HLA-DQA1*05:01-B1*02:01L HLA-DQA1*01:03-B1*06:01L
LKEGQINDMIL

SEQ ID NO: 23502 - protein, 11 aa, Severe acute respiratory syndrome coronavirus 2
  REGION 1..11: note = Table B: HLA-DQA1*05:01-B1*02:01L
TAGAAAYYVGY

SEQ ID NO: 23503 - protein, 13 aa, Severe acute respiratory syndrome coronavirus 2
  REGION 1..13: note = Table B: HLA-DQA1*05:01-B1*02:01L
TITDAVDCALDPL

SEQ ID NO: 23504 - protein, 12 aa, Severe acute respiratory syndrome coronavirus 2
  REGION 1..12: note = Table B: HLA-DQA1*05:01-B1*02:01L
QFGRDIADTTDA

SEQ ID NO: 23505 - protein, 13 aa, Severe acute respiratory syndrome coronavirus 2
  REGION 1..13: note = Table B: HLA-DQA1*05:01-B1*02:01L HLA-DRB1*04:08L
SVAYSNNSIAIPT

SEQ ID NO: 23506 - protein, 13 aa, Severe acute respiratory syndrome coronavirus 2
  REGION 1..13: note = Table B: HLA-DQA1*05:01-B1*02:01L
IPTNFTISVTTEI

SEQ ID NO: 23507 - protein, 19 aa, Severe acute respiratory syndrome coronavirus 2
  REGION 1..19: note = Table B: HLA-DQA1*05:01-B1*02:01L
LPDPSKPSKRSFIEDLLFN

SEQ ID NO: 23508 - protein, 12 aa, Severe acute respiratory syndrome coronavirus 2
  REGION 1..12: note = Table B: HLA-DQA1*05:01-B1*02:01L HLA-DRB1*12:01L HLA-DPA1*03:01-B1*105:01L HLA-DRB1*16:01L HLA-DRB1*15:03L
VTQNVLYENQKL

SEQ ID NO: 23509 - protein, 12 aa, Severe acute respiratory syndrome coronavirus 2
  REGION 1..12: note = Table B: HLA-DQA1*05:01-B1*02:01L HLA-DPA1*02:01-B1*13:01L
VTQRNFYEPQII

SEQ ID NO: 23510 - protein, 12 aa, Severe acute respiratory syndrome coronavirus 2
  REGION 1..12: note = Table B: HLA-DQA1*05:01-B1*02:01L HLA-DQA1*03:01-B1*03:02L HLA-DRB1*16:01L HLA-DRB1*15:03L
TQRNFYEPQIIT

SEQ ID NO: 23511 - protein, 11 aa, Severe acute respiratory syndrome coronavirus 2
  REGION 1..11: note = Table B: HLA-DQA1*05:01-B1*02:01L
IVNNTVYDPLQ

SEQ ID NO: 23512 - protein, 12 aa, Severe acute respiratory syndrome coronavirus 2
  REGION 1..12: note = Table B: HLA-DQA1*05:01-B1*02:01L HLA-DPA1*02:01-B1*13:01L HLA-DQA1*03:01-B1*03:02L
AKNLNESLIDLQ

SEQ ID NO: 23513 - protein, 12 aa, Severe acute respiratory syndrome coronavirus 2
  REGION 1..12: note = Table B: HLA-DQA1*05:01-B1*02:01L
NLNESLIDLQEL

SEQ ID NO: 23514 - protein, 11 aa, Severe acute respiratory syndrome coronavirus 2
  REGION 1..11: note = Table B: HLA-DQA1*05:01-B1*02:01L
SKNPLLYDANY

SEQ ID NO: 23515 - protein, 11 aa, Severe acute respiratory syndrome coronavirus 2
  REGION 1..11: note = Table B: HLA-DQA1*05:01-B1*02:01L
IPYNSVTSSIV

SEQ ID NO: 23516 - protein, 12 aa, Severe acute respiratory syndrome coronavirus 2
  REGION 1..12: note = Table B: HLA-DQA1*05:01-B1*02:01L
MEPIYDEPTTTT

SEQ ID NO: 23517 - protein, 12 aa, Severe acute respiratory syndrome coronavirus 2
  REGION 1..12: note = Table B: HLA-DQA1*05:01-B1*02:01L
SSSSDNIALLVQ

SEQ ID NO: 23518 - protein, 15 aa, Severe acute respiratory syndrome coronavirus 2
  REGION 1..15: note = Table B: HLA-DQA1*05:01-B1*02:01L
LIIMRTFKVSIWNLD

SEQ ID NO: 23519 - protein, 16 aa, Severe acute respiratory syndrome coronavirus 2
  REGION 1..16: note = Table B: HLA-DQA1*05:01-B1*02:01L HLA-DRB3*01:01L HLA-DPA1*02:01-B1*13:01L
APLIELCVDEAGSKSP

SEQ ID NO: 23520 - protein, 11 aa, Severe acute respiratory syndrome coronavirus 2
  REGION 1..11: note = Table B: HLA-DQA1*05:01-B1*02:01L HLA-DQA1*03:01-B1*03:02L HLA-DRB1*16:01L HLA-DQA1*02:01-B1*03:03L
LPYGANKDGII

SEQ ID NO: 23521 - protein, 13 aa, Severe acute respiratory syndrome coronavirus 2
  REGION 1..13: note = Table B: HLA-DQA1*05:01-B1*02:01L HLA-DRB1*14:54L HLA-DRB1*16:01L
SPARMAGNGGDAA

SEQ ID NO: 23522 - protein, 12 aa, Severe acute respiratory syndrome coronavirus 2
  REGION 1..12: note = Table B: HLA-DQA1*05:01-B1*02:01L HLA-DRB1*12:01L HLA-DPA1*03:01-B1*105:01L HLA-DPA1*01:02-B1*04:01L HLA-DRB1*15:03L
DAALALLLLDRL

SEQ ID NO: 23523 - protein, 12 aa, Severe acute respiratory syndrome coronavirus 2
  REGION 1..12: note = Table B: HLA-DQA1*05:01-B1*02:01L
QTVTLLPAADLD

SEQ ID NO: 23524 - protein, 14 aa, Severe acute respiratory syndrome coronavirus 2
  REGION 1..14: note = Table B: HLA-DRB1*13:01L HLA-DPA1*01:03-B1*02:01L HLA-DRB1*15:01L
EIAWYTERSEKSYE

SEQ ID NO: 23525 - protein, 14 aa, Severe acute respiratory syndrome coronavirus 2
  REGION 1..14: note = Table B: HLA-DRB1*13:01L
TSAFVETVKGLDYK

SEQ ID NO: 23526 - protein, 14 aa, Severe acute respiratory syndrome coronavirus 2
  REGION 1..14: note = Table B: HLA-DRB1*13:01L
IFSRTLETAQNSVR

SEQ ID NO: 23527 - protein, 14 aa, Severe acute respiratory syndrome coronavirus 2
  REGION 1..14: note = Table B: HLA-DRB1*13:01L HLA-DRB4*01:01L HLA-DRB1*04:10L HLA-DRB1*12:02L HLA-DRB1*15:01L
EGVEFLRDGWEIVK

SEQ ID NO: 23528 - protein, 14 aa, Severe acute respiratory syndrome coronavirus 2
  REGION 1..14: note = Table B: HLA-DRB1*13:01L HLA-DPA1*01:03-B1*02:01L
NVYLAVFDKNLYDK

SEQ ID NO: 23529 - protein, 16 aa, Severe acute respiratory syndrome coronavirus 2
  REGION 1..16: note = Table B: HLA-DRB1*13:01L HLA-DRB4*01:01L HLA-DPA1*01:03-B1*04:01L HLA-DQA1*05:05-B1*03:116L
VSSFLEMKSEKQVEQK

SEQ ID NO: 23530 - protein, 15 aa, Severe acute respiratory syndrome coronavirus 2
  REGION 1..15: note = Table B: HLA-DRB1*13:01L
VTTTLEETKFLTENL

SEQ ID NO: 23531 - protein, 14 aa, Severe acute respiratory syndrome coronavirus 2
  REGION 1..14: note = Table B: HLA-DRB1*13:01L
NGYTVEEAKTVLKK

SEQ ID NO: 23532 - protein, 15 aa, Severe acute respiratory syndrome coronavirus 2
  REGION 1..15: note = Table B: HLA-DRB1*13:01L HLA-DPA1*01:03-B1*02:01L HLA-DRB1*08:02L
SVYYTSNPTTFHLDG

SEQ ID NO: 23533 - protein, 14 aa, Severe acute respiratory syndrome coronavirus 2
  REGION 1..14: note = Table B: HLA-DRB1*13:01L
ENSYTTTIKPVTYK

SEQ ID NO: 23534 - protein, 14 aa, Severe acute respiratory syndrome coronavirus 2
  REGION 1..14: note = Table B: HLA-DRB1*13:01L HLA-DRB4*01:01L HLA-DPA1*01:03-B1*02:01L
VGDIILKPANNSLK

SEQ ID NO: 23535 - protein, 13 aa, Severe acute respiratory syndrome coronavirus 2
  REGION 1..13: note = Table B: HLA-DRB1*13:01L HLA-DPA1*01:03-B1*02:01L
MAAYVDNSSLTIK

SEQ ID NO: 23536 - protein, 12 aa, Severe acute respiratory syndrome coronavirus 2
  REGION 1..12: note = Table B: HLA-DRB1*13:01L
TFISDEVARDLS

SEQ ID NO: 23537 - protein, 16 aa, Severe acute respiratory syndrome coronavirus 2
  REGION 1..16: note = Table B: HLA-DRB1*13:01L HLA-DRB1*07:01L
IHLYFDKAGQKTYERH

SEQ ID NO: 23538 - protein, 14 aa, Severe acute respiratory syndrome coronavirus 2
  REGION 1..14: note = Table B: HLA-DRB1*13:01L HLA-DRB1*07:01L
RYLALYNKYKYFSG

SEQ ID NO: 23539 - protein, 14 aa, Severe acute respiratory syndrome coronavirus 2
  REGION 1..14: note = Table B: HLA-DRB1*13:01L HLA-DRB1*08:03L
LKLKVDTANPKTPK

SEQ ID NO: 23540 - protein, 17 aa, Severe acute respiratory syndrome coronavirus 2
  REGION 1..17: note = Table B: HLA-DRB1*13:01L HLA-DRB1*15:01L
NPKTPKYKFVRIQPGQT

SEQ ID NO: 23541 - protein, 15 aa, Severe acute respiratory syndrome coronavirus 2
  REGION 1..15: note = Table B: HLA-DRB1*13:01L
VYKVYYGNALDQAIS

SEQ ID NO: 23542 - protein, 18 aa, Severe acute respiratory syndrome coronavirus 2
  REGION 1..18: note = Table B: HLA-DRB1*13:01L
SIDAFKLNIKLLGVGGKP

SEQ ID NO: 23543 - protein, 16 aa, Severe acute respiratory syndrome coronavirus 2
  REGION 1..16: note = Table B: HLA-DRB1*13:01L
SEVVLKKLKKSLNVAK

SEQ ID NO: 23544 - protein, 16 aa, Severe acute respiratory syndrome coronavirus 2
  REGION 1..16: note = Table B: HLA-DRB1*13:01L HLA-DRB4*01:01L HLA-DPA1*01:03-B1*104:01L
LNNIINNARDGCVPLN

SEQ ID NO: 23545 - protein, 16 aa, Severe acute respiratory syndrome coronavirus 2
  REGION 1..16: note = Table B: HLA-DRB1*13:01L
DDNALAYYNTTKGGRF

SEQ ID NO: 23546 - protein, 14 aa, Severe acute respiratory syndrome coronavirus 2
  REGION 1..14: note = Table B: HLA-DRB1*13:01L
ALAYYNTTKGGRFV

SEQ ID NO: 23547 - protein, 14 aa, Severe acute respiratory syndrome coronavirus 2
  REGION 1..14: note = Table B: HLA-DRB1*13:01L
GDMVPHISRQRLTK

SEQ ID NO: 23548 - protein, 15 aa, Severe acute respiratory syndrome coronavirus 2
  REGION 1..15: note = Table B: HLA-DRB1*13:01L
SVLYYQNNVFMSEAK

SEQ ID NO: 23549 - protein, 15 aa, Severe acute respiratory syndrome coronavirus 2
  REGION 1..15: note = Table B: HLA-DRB1*13:01L
FDKFKVNSTLEQYVF

SEQ ID NO: 23550 - protein, 14 aa, Severe acute respiratory syndrome coronavirus 2
  REGION 1..14: note = Table B: HLA-DRB1*13:01L HLA-DRB4*01:01L HLA-DPA1*01:03-B1*04:01L HLA-DQA1*05:05-B1*03:116L
MGFKMNYQVNGYPN

SEQ ID NO: 23551 - protein, 18 aa, Severe acute respiratory syndrome coronavirus 2
  REGION 1..18: note = Table B: HLA-DRB1*13:01L
LPETYFTQSRNLQEFKPR

SEQ ID NO: 23552 - protein, 16 aa, Severe acute respiratory syndrome coronavirus 2
  REGION 1..16: note = Table B: HLA-DRB1*13:01L
MDEFIERYKLEGYAFE

SEQ ID NO: 23553 - protein, 13 aa, Severe acute respiratory syndrome coronavirus 2
  REGION 1..13: note = Table B: HLA-DRB1*13:01L HLA-DPA1*01:03-B1*04:02L HLA-DQA1*05:05-B1*03:01L HLA-DRB1*07:01L
NDFVSDADSTLIG

SEQ ID NO: 23554 - protein, 12 aa, Severe acute respiratory syndrome coronavirus 2
  REGION 1..12: note = Table B: HLA-DRB1*13:01L HLA-DPA1*01:03-B1*02:01L HLA-DPA1*01:03-B1*104:01L HLA-DRB1*08:02L
NYIFWRNTNPIQ

SEQ ID NO: 23555 - protein, 13 aa, Severe acute respiratory syndrome coronavirus 2
  REGION 1..13: note = Table B: HLA-DRB1*13:01L HLA-DPA1*01:03-B1*04:01L HLA-DPA1*01:03-B1*02:01L HLA-DRB1*08:02L
RGVYYPDKVFRSS

SEQ ID NO: 23556 - protein, 14 aa, Severe acute respiratory syndrome coronavirus 2
  REGION 1..14: note = Table B: HLA-DRB1*13:01L HLA-DPA1*01:03-B1*104:01L HLA-DRB1*08:02L
GVYYPDKVFRSSVL

SEQ ID NO: 23557 - protein, 14 aa, Severe acute respiratory syndrome coronavirus 2
  REGION 1..14: note = Table B: HLA-DRB1*13:01L
KGIYQTSNFRVQPT

SEQ ID NO: 23558 - protein, 14 aa, Severe acute respiratory syndrome coronavirus 2
  REGION 1..14: note = Table B: HLA-DRB1*13:01L
RFASVYAWNRKRIS

SEQ ID NO: 23559 - protein, 15 aa, Severe acute respiratory syndrome coronavirus 2
  REGION 1..15: note = Table B: HLA-DRB1*13:01L HLA-DRB1*08:03L
TGVLTESNKKFLPFQ

SEQ ID NO: 23560 - protein, 16 aa, Severe acute respiratory syndrome coronavirus 2
  REGION 1..16: note = Table B: HLA-DRB1*13:01L HLA-DRB1*07:01L
ADQLTPTWRVYSTGSN

SEQ ID NO: 23561 - protein, 16 aa, Severe acute respiratory syndrome coronavirus 2
  REGION 1..16: note = Table B: HLA-DRB1*13:01L HLA-DPA1*01:03-B1*04:02L HLA-DRB3*01:01L
AENSVAYSNNSIAIPT

SEQ ID NO: 23562 - protein, 14 aa, Severe acute respiratory syndrome coronavirus 2
  REGION 1..14: note = Table B: HLA-DRB1*13:01L HLA-DRB1*07:01L
KRSFIEDLLFNKVT

SEQ ID NO: 23563 - protein, 15 aa, Severe acute respiratory syndrome coronavirus 2
  REGION 1..15: note = Table B: HLA-DRB1*13:01L
LIDLQELGKYEQYIK

SEQ ID NO: 23564 - protein, 15 aa, Severe acute respiratory syndrome coronavirus 2
  REGION 1..15: note = Table B: HLA-DRB1*13:01L
TPSDFVRATATIPIQ

SEQ ID NO: 23565 - protein, 15 aa, Severe acute respiratory syndrome coronavirus 2
  REGION 1..15: note = Table B: HLA-DRB1*13:01L
LAVFQSASKIITLKK

SEQ ID NO: 23566 - protein, 14 aa, Severe acute respiratory syndrome coronavirus 2
  REGION 1..14: note = Table B: HLA-DRB1*13:01L
KIITLKKRWQLALS

SEQ ID NO: 23567 - protein, 16 aa, Severe acute respiratory syndrome coronavirus 2
  REGION 1..16: note = Table B: HLA-DRB1*13:01L HLA-DPA1*01:03-B1*04:01L HLA-DPA1*01:03-B1*104:01L
DSGFAAYSRYRIGNYK

SEQ ID NO: 23568 - protein, 14 aa, Severe acute respiratory syndrome coronavirus 2
  REGION 1..14: note = Table B: HLA-DRB1*13:01L
DQIGYYRRATRRIR

SEQ ID NO: 23569 - protein, 19 aa, Severe acute respiratory syndrome coronavirus 2
  REGION 1..19: note = Table B: HLA-DRB1*13:01L HLA-DRB1*12:02L
DDKDPNFKDQVILLNKHID

SEQ ID NO: 23570 - protein, 18 aa, Severe acute respiratory syndrome coronavirus 2
  REGION 1..18: note = Table B: HLA-DRB4*01:01L
DSVEEVLSEARQHLKDGT

SEQ ID NO: 23571 - protein, 18 aa, Severe acute respiratory syndrome coronavirus 2
  REGION 1..18: note = Table B: HLA-DRB4*01:01L HLA-DQA1*05:05-B1*03:116L
APNMMVTNNTFTLKGGAP

SEQ ID NO: 23572 - protein, 14 aa, Severe acute respiratory syndrome coronavirus 2
  REGION 1..14: note = Table B: HLA-DRB4*01:01L
LLLYIDINGNLHPD

SEQ ID NO: 23573 - protein, 14 aa, Severe acute respiratory syndrome coronavirus 2
  REGION 1..14: note = Table B: HLA-DRB4*01:01L HLA-DPA1*02:01-B1*13:01L
LLYIDINGNLHPDS

SEQ ID NO: 23574 - protein, 15 aa, Severe acute respiratory syndrome coronavirus 2
  REGION 1..15: note = Table B: HLA-DRB4*01:01L
IVGDVVQEGVLTAVV

SEQ ID NO: 23575 - protein, 14 aa, Severe acute respiratory syndrome coronavirus 2
  REGION 1..14: note = Table B: HLA-DRB4*01:01L
ASLINTLNDLNETL

SEQ ID NO: 23576 - protein, 14 aa, Severe acute respiratory syndrome coronavirus 2
  REGION 1..14: note = Table B: HLA-DRB4*01:01L
TFYVLPNDDTLRVE

SEQ ID NO: 23577 - protein, 18 aa, Severe acute respiratory syndrome coronavirus 2
  REGION 1..18: note = Table B: HLA-DRB4*01:01L HLA-DQA1*05:05-B1*03:116L HLA-DRB1*09:01L HLA-DQA1*05:05-B1*03:01L
LDNYYKKDNSYFTEQPID

SEQ ID NO: 23578 - protein, 17 aa, Severe acute respiratory syndrome coronavirus 2
  REGION 1..17: note = Table B: HLA-DRB4*01:01L HLA-DPA1*01:03-B1*04:01L HLA-DRB1*08:02L
DNFKFVCDNIKFADDLN

SEQ ID NO: 23579 - protein, 12 aa, Severe acute respiratory syndrome coronavirus 2
  REGION 1..12: note = Table B: HLA-DRB4*01:01L HLA-DRB1*12:02L
VVENPTIQKDVL

SEQ ID NO: 23580 - protein, 18 aa, Severe acute respiratory syndrome coronavirus 2
  REGION 1..18: note = Table B: HLA-DRB4*01:01L HLA-DRB1*08:02L
VPWDTIANYAKPFLNKVV

SEQ ID NO: 23581 - protein, 15 aa, Severe acute respiratory syndrome coronavirus 2
  REGION 1..15: note = Table B: HLA-DRB4*01:01L HLA-DPA1*01:03-B1*02:01L HLA-DRB1*08:02L
IINLVQMAPISAMVR

SEQ ID NO: 23582 - protein, 16 aa, Severe acute respiratory syndrome coronavirus 2
  REGION 1..16: note = Table B: HLA-DRB4*01:01L HLA-DPA1*02:01-B1*13:01L HLA-DRB1*08:02L
LPINVIVFDGKSKCEE

SEQ ID NO: 23583 - protein, 16 aa, Severe acute respiratory syndrome coronavirus 2
  REGION 1..16: note = Table B: HLA-DRB4*01:01L HLA-DQA1*05:05-B1*03:116L
NYMLTYNKVENMTPRD

SEQ ID NO: 23584 - protein, 15 aa, Severe acute respiratory syndrome coronavirus 2
  REGION 1..15: note = Table B: HLA-DRB4*01:01L HLA-DRB1*15:01L
ASEFSSLPSYAAFAT

SEQ ID NO: 23585 - protein, 16 aa, Severe acute respiratory syndrome coronavirus 2
  REGION 1..16: note = Table B: HLA-DRB4*01:01L HLA-DPA1*01:03-B1*104:01L HLA-DRB1*08:02L
KKSLNVAKSEFDRDAA

SEQ ID NO: 23586 - protein, 16 aa, Severe acute respiratory syndrome coronavirus 2
  REGION 1..16: note = Table B: HLA-DRB4*01:01L
AKSEFDRDAAMQRKLE

SEQ ID NO: 23587 - protein, 18 aa, Severe acute respiratory syndrome coronavirus 2
  REGION 1..18: note = Table B: HLA-DRB4*01:01L
NPDILRVYANLGERVRQA

SEQ ID NO: 23588 - protein, 18 aa, Severe acute respiratory syndrome coronavirus 2
  REGION 1..18: note = Table B: HLA-DRB4*01:01L HLA-DPA1*01:03-B1*04:02L
PILTLTRALTAESHVDTD

SEQ ID NO: 23589 - protein, 16 aa, Severe acute respiratory syndrome coronavirus 2
  REGION 1..16: note = Table B: HLA-DRB4*01:01L HLA-DRB1*12:02L HLA-DRB1*14:17L HLA-DRB1*15:01L
DYDYYRYNLPTMCDIR

SEQ ID NO: 23590 - protein, 18 aa, Severe acute respiratory syndrome coronavirus 2
  REGION 1..18: note = Table B: HLA-DRB4*01:01L HLA-DRB1*09:01L
GGWHNMLKTVYSDVENPH

SEQ ID NO: 23591 - protein, 15 aa, Severe acute respiratory syndrome coronavirus 2
  REGION 1..15: note = Table B: HLA-DRB4*01:01L HLA-DPA1*01:03-B1*104:01L
LDMYSVMLTNDNTSR

SEQ ID NO: 23592 - protein, 17 aa, Severe acute respiratory syndrome coronavirus 2
  REGION 1..17: note = Table B: HLA-DRB4*01:01L HLA-DQA1*05:05-B1*03:116L
SHKLVLSVNPYVCNAPG

SEQ ID NO: 23593 - protein, 18 aa, Severe acute respiratory syndrome coronavirus 2
  REGION 1..18: note = Table B: HLA-DRB4*01:01L HLA-DQA1*05:05-B1*03:116L
ANGQVFGLYKNTCVGSDN

SEQ ID NO: 23594 - protein, 17 aa, Severe acute respiratory syndrome coronavirus 2
  REGION 1..17: note = Table B: HLA-DRB4*01:01L HLA-DQA1*05:05-B1*03:116L HLA-DPA1*01:03-B1*02:01L
TGYRVTKNSKVQIGEYT

SEQ ID NO: 23595 - protein, 17 aa, Severe acute respiratory syndrome coronavirus 2
  REGION 1..17: note = Table B: HLA-DRB4*01:01L HLA-DRB1*08:02L
DYFVLTSHTVMPLSAPT

SEQ ID NO: 23596 - protein, 14 aa, Severe acute respiratory syndrome coronavirus 2
  REGION 1..14: note = Table B: HLA-DRB4*01:01L HLA-DPA1*01:03-B1*04:02L HLA-DPA1*01:03-B1*104:01L HLA-DRB1*08:02L
AKHYVYIGDPAQLP

SEQ ID NO: 23597 - protein, 18 aa, Severe acute respiratory syndrome coronavirus 2
  REGION 1..18: note = Table B: HLA-DRB4*01:01L
ADVEWKFYDAQPCSDKAY

SEQ ID NO: 23598 - protein, 16 aa, Severe acute respiratory syndrome coronavirus 2
  REGION 1..16: note = Table B: HLA-DRB4*01:01L
LENVAFNVVNKGHFDG

SEQ ID NO: 23599 - protein, 15 aa, Severe acute respiratory syndrome coronavirus 2
  REGION 1..15: note = Table B: HLA-DRB4*01:01L HLA-DPA1*01:03-B1*02:01L HLA-DPA1*01:03-B1*104:01L
VIWDYKRDAPAHIST

SEQ ID NO: 23600 - protein, 13 aa, Severe acute respiratory syndrome coronavirus 2
  REGION 1..13: note = Table B: HLA-DRB4*01:01L
YIFWRNTNPIQLS

SEQ ID NO: 23601 - protein, 18 aa, Severe acute respiratory syndrome coronavirus 2
  REGION 1..18: note = Table B: HLA-DRB4*01:01L
SKGRLIIRENNRVVISSD

SEQ ID NO: 23602 - protein, 15 aa, Severe acute respiratory syndrome coronavirus 2
  REGION 1..15: note = Table B: HLA-DRB4*01:01L HLA-DPA1*01:03-B1*02:01L HLA-DRB1*08:03L
SEFRVYSSANNCTFE

SEQ ID NO: 23603 - protein, 14 aa, Severe acute respiratory syndrome coronavirus 2
  REGION 1..14: note = Table B: HLA-DRB4*01:01L
TSNFRVQPTESIVR

SEQ ID NO: 23604 - protein, 16 aa, Severe acute respiratory syndrome coronavirus 2
  REGION 1..16: note = Table B: HLA-DRB4*01:01L
SNFRVQPTESIVRFPN

SEQ ID NO: 23605 - protein, 13 aa, Severe acute respiratory syndrome coronavirus 2
  REGION 1..13: note = Table B: HLA-DRB4*01:01L HLA-DPA1*01:03-B1*04:02L HLA-DPA1*01:03-B1*104:01L
VADYSVLYNSASF

SEQ ID NO: 23606 - protein, 16 aa, Severe acute respiratory syndrome coronavirus 2
  REGION 1..16: note = Table B: HLA-DRB4*01:01L HLA-DPA1*01:03-B1*02:01L
VTTEILPVSMTKTSVD

SEQ ID NO: 23607 - protein, 14 aa, Severe acute respiratory syndrome coronavirus 2
  REGION 1..14: note = Table B: HLA-DRB4*01:01L
NTLVKQLSSNFGAI

SEQ ID NO: 23608 - protein, 14 aa, Severe acute respiratory syndrome coronavirus 2
  REGION 1..14: note = Table B: HLA-DRB4*01:01L HLA-DRB1*09:01L HLA-DPA1*01:03-B1*104:01L
FFIYNKIVDEPEEH

SEQ ID NO: 23609 - protein, 18 aa, Severe acute respiratory syndrome coronavirus 2
  REGION 1..18: note = Table B: HLA-DRB4*01:01L
TLSYYKLGASQRVAGDSG

SEQ ID NO: 23610 - protein, 11 aa, Severe acute respiratory syndrome coronavirus 2
  REGION 1..11: note = Table B: HLA-DRB4*01:01L
NLSKSLTENKY

SEQ ID NO: 23611 - protein, 16 aa, Severe acute respiratory syndrome coronavirus 2
  REGION 1..16: note = Table B: HLA-DRB4*01:01L
ENKYSQLDEEQPMEID

SEQ ID NO: 23612 - protein, 14 aa, Severe acute respiratory syndrome coronavirus 2
  REGION 1..14: note = Table B: HLA-DRB4*01:01L
FLEYHDVRVVLDFI

SEQ ID NO: 23613 - protein, 19 aa, Severe acute respiratory syndrome coronavirus 2
  REGION 1..19: note = Table B: HLA-DRB4*01:01L
PSGTWLTYTGAIKLDDKDP

SEQ ID NO: 23614 - protein, 11 aa, Severe acute respiratory syndrome coronavirus 2
  REGION 1..11: note = Table B: HLA-DPA1*01:03-B1*04:01L
TSWQTGDFVKA

SEQ ID NO: 23615 - protein, 16 aa, Severe acute respiratory syndrome coronavirus 2
  REGION 1..16: note = Table B: HLA-DPA1*01:03-B1*04:01L
NHTGVVGEGSEGLNDN

SEQ ID NO: 23616 - protein, 13 aa, Severe acute respiratory syndrome coronavirus 2
  REGION 1..13: note = Table B: HLA-DPA1*01:03-B1*04:01L HLA-DPA1*02:01-B1*13:01L
LVVMAYITGGVVQ

SEQ ID NO: 23617 - protein, 12 aa, Severe acute respiratory syndrome coronavirus 2
  REGION 1..12: note = Table B: HLA-DPA1*01:03-B1*04:01L HLA-DPA1*01:03-B1*04:02L HLA-DRB1*12:01L HLA-DPA1*03:01-B1*105:01L HLA-DPA1*01:02-B1*04:01L HLA-DRB1*16:01L HLA-DRB1*15:03L
GVEFLRDGWEIV

SEQ ID NO: 23618 - protein, 16 aa, Severe acute respiratory syndrome coronavirus 2
  REGION 1..16: note = Table B: HLA-DPA1*01:03-B1*04:01L HLA-DRB1*12:01L
LDEWSMATYYLFDESG

SEQ ID NO: 23619 - protein, 16 aa, Severe acute respiratory syndrome coronavirus 2
  REGION 1..16: note = Table B: HLA-DPA1*01:03-B1*04:01L HLA-DRB1*15:01L
YKGIKIQEGVVDYGAR

SEQ ID NO: 23620 - protein, 19 aa, Severe acute respiratory syndrome coronavirus 2
  REGION 1..19: note = Table B: HLA-DPA1*01:03-B1*04:01L
PDAVTAYNGYLTSSSKTPE

SEQ ID NO: 23621 - protein, 19 aa, Severe acute respiratory syndrome coronavirus 2
  REGION 1..19: note = Table B: HLA-DPA1*01:03-B1*04:01L
KPHNSHEGKTFYVLPNDDT

SEQ ID NO: 23622 - protein, 11 aa, Severe acute respiratory syndrome coronavirus 2
  REGION 1..11: note = Table B: HLA-DPA1*01:03-B1*04:01L HLA-DRB1*16:01L
RELKVTFFPDL

SEQ ID NO: 23623 - protein, 13 aa, Severe acute respiratory syndrome coronavirus 2
  REGION 1..13: note = Table B: HLA-DPA1*01:03-B1*04:01L HLA-DRB1*16:01L HLA-DRB1*04:08L
SSFKWDLTAFGLV

SEQ ID NO: 23624 - protein, 12 aa, Severe acute respiratory syndrome coronavirus 2
  REGION 1..12: note = Table B: HLA-DPA1*01:03-B1*04:01L
AEWFLAYILFTR

SEQ ID NO: 23625 - protein, 11 aa, Severe acute respiratory syndrome coronavirus 2
  REGION 1..11: note = Table B: HLA-DPA1*01:03-B1*04:01L HLA-DPA1*01:03-B1*04:02L
ILFTRFFYVLG

SEQ ID NO: 23626 - protein, 11 aa, Severe acute respiratory syndrome coronavirus 2
  REGION 1..11: note = Table B: HLA-DPA1*01:03-B1*04:01L
SYFAVHFISNS

SEQ ID NO: 23627 - protein, 14 aa, Severe acute respiratory syndrome coronavirus 2
  REGION 1..14: note = Table B: HLA-DPA1*01:03-B1*04:01L HLA-DPA1*01:03-B1*02:01L HLA-DRB1*15:01L
QSSYIVDSVTVKNG

SEQ ID NO: 23628 - protein, 13 aa, Severe acute respiratory syndrome coronavirus 2
  REGION 1..13: note = Table B: HLA-DPA1*01:03-B1*04:01L HLA-DRB3*01:01L HLA-DPA1*01:03-B1*02:01L
YLTNDVSFLAHIQ

SEQ ID NO: 23629 - protein, 13 aa, Severe acute respiratory syndrome coronavirus 2
  REGION 1..13: note = Table B: HLA-DPA1*01:03-B1*04:01L HLA-DPA1*01:03-B1*04:02L HLA-DRB3*01:01L
TFLLNKEMYLKLR

SEQ ID NO: 23630 - protein, 14 aa, Severe acute respiratory syndrome coronavirus 2
  REGION 1..14: note = Table B: HLA-DPA1*01:03-B1*04:01L
LNPNYEDLLIRKSN

SEQ ID NO: 23631 - protein, 13 aa, Severe acute respiratory syndrome coronavirus 2
  REGION 1..13: note = Table B: HLA-DPA1*01:03-B1*04:01L HLA-DPA1*01:03-B1*04:02L HLA-DPA1*01:02-B1*04:01L
GIVFMCVEYCPIF

SEQ ID NO: 23632 - protein, 11 aa, Severe acute respiratory syndrome coronavirus 2
  REGION 1..11: note = Table B: HLA-DPA1*01:03-B1*04:01L HLA-DPA1*03:01-B1*105:01L
QTMLFTMLRKL

SEQ ID NO: 23633 - protein, 11 aa, Severe acute respiratory syndrome coronavirus 2
  REGION 1..11: note = Table B: HLA-DPA1*01:03-B1*04:01L
TYASALWEIQQ

SEQ ID NO: 23634 - protein, 16 aa, Severe acute respiratory syndrome coronavirus 2
  REGION 1..16: note = Table B: HLA-DPA1*01:03-B1*04:01L HLA-DPA1*01:03-B1*04:02L HLA-DPA1*01:03-B1*104:01L HLA-DRB1*08:03L
DYFNKKDWYDFVENPD

SEQ ID NO: 23635 - protein, 17 aa, Severe acute respiratory syndrome coronavirus 2
  REGION 1..17: note = Table B: HLA-DPA1*01:03-B1*04:01L
NPDILRVYANLGERVRQ

SEQ ID NO: 23636 - protein, 15 aa, Severe acute respiratory syndrome coronavirus 2
  REGION 1..15: note = Table B: HLA-DPA1*01:03-B1*04:01L
KARLYYDSMSYEDQD

SEQ ID NO: 23637 - protein, 12 aa, Severe acute respiratory syndrome coronavirus 2
  REGION 1..12: note = Table B: HLA-DPA1*01:03-B1*04:01L HLA-DPA1*01:03-B1*04:02L HLA-DPA1*01:02-B1*04:01L HLA-DRB1*16:01L
TTAYANSVFNIC

SEQ ID NO: 23638 - protein, 11 aa, Severe acute respiratory syndrome coronavirus 2
  REGION 1..11: note = Table B: HLA-DPA1*01:03-B1*04:01L HLA-DPA1*01:03-B1*04:02L
AYANSVFNICQ

SEQ ID NO: 23639 - protein, 13 aa, Severe acute respiratory syndrome coronavirus 2
  REGION 1..13: note = Table B: HLA-DPA1*01:03-B1*04:01L
YANSVFNICQAVT

SEQ ID NO: 23640 - protein, 16 aa, Severe acute respiratory syndrome coronavirus 2
  REGION 1..16: note = Table B: HLA-DPA1*01:03-B1*04:01L HLA-DRB1*09:01L
GQVFGLYKNTCVGSDN

SEQ ID NO: 23641 - protein, 15 aa, Severe acute respiratory syndrome coronavirus 2
  REGION 1..15: note = Table B: HLA-DPA1*01:03-B1*04:01L
YKLNVGDYFVLTSHT

SEQ ID NO: 23642 - protein, 13 aa, Severe acute respiratory syndrome coronavirus 2
  REGION 1..13: note = Table B: HLA-DPA1*01:03-B1*04:01L HLA-DPA1*01:03-B1*04:02L HLA-DPA1*02:01-B1*13:01L
EKALKYLPIDKCS

SEQ ID NO: 23643 - protein, 12 aa, Severe acute respiratory syndrome coronavirus 2
  REGION 1..12: note = Table B: HLA-DPA1*01:03-B1*04:01L HLA-DPA1*01:03-B1*04:02L HLA-DQA1*01:03-B1*06:01L
STLEQYVFCTVN

SEQ ID NO: 23644 - protein, 16 aa, Severe acute respiratory syndrome coronavirus 2
  REGION 1..16: note = Table B: HLA-DPA1*01:03-B1*04:01L HLA-DPA1*01:03-B1*04:02L
ARLRAKHYVYIGDPAQ

SEQ ID NO: 23645 - protein, 12 aa, Severe acute respiratory syndrome coronavirus 2
  REGION 1..12: note = Table B: HLA-DPA1*01:03-B1*04:01L HLA-DPA1*01:03-B1*04:02L HLA-DRB1*16:01L HLA-DRB1*15:03L
GFDYVYNPFMID

SEQ ID NO: 23646 - protein, 12 aa, Severe acute respiratory syndrome coronavirus 2
  REGION 1..12: note = Table B: HLA-DPA1*01:03-B1*04:01L HLA-DPA1*01:03-B1*04:02L
FDYVYNPFMIDV

SEQ ID NO: 23647 - protein, 18 aa, Severe acute respiratory syndrome coronavirus 2
  REGION 1..18: note = Table B: HLA-DPA1*01:03-B1*04:01L HLA-DRB1*09:01L
DGGSLYVNKHAFHTPAFD

SEQ ID NO: 23648 - protein, 16 aa, Severe acute respiratory syndrome coronavirus 2
  REGION 1..16: note = Table B: HLA-DPA1*01:03-B1*04:01L HLA-DQA1*05:05-B1*03:116L
IWDYKRDAPAHISTIG

SEQ ID NO: 23649 - protein, 11 aa, Severe acute respiratory syndrome coronavirus 2
  REGION 1..11: note = Table B: HLA-DPA1*01:03-B1*04:01L
ENDSKEGFFTY

SEQ ID NO: 23650 - protein, 14 aa, Severe acute respiratory syndrome coronavirus 2
  REGION 1..14: note = Table B: HLA-DPA1*01:03-B1*04:01L
WTAFVTNVNASSSE

SEQ ID NO: 23651 - protein, 14 aa, Severe acute respiratory syndrome coronavirus 2
  REGION 1..14: note = Table B: HLA-DPA1*01:03-B1*04:01L
TAFVTNVNASSSEA

SEQ ID NO: 23652 - protein, 13 aa, Severe acute respiratory syndrome coronavirus 2
  REGION 1..13: note = Table B: HLA-DPA1*01:03-B1*04:01L HLA-DPA1*01:03-B1*04:02L
TQDLFLPFFSNVT

SEQ ID NO: 23653 - protein, 16 aa, Severe acute respiratory syndrome coronavirus 2
  REGION 1..16: note = Table B: HLA-DPA1*01:03-B1*04:01L HLA-DRB1*10:01L
NGTKRFDNPVLPFNDG

SEQ ID NO: 23654 - protein, 13 aa, Severe acute respiratory syndrome coronavirus 2
  REGION 1..13: note = Table B: HLA-DPA1*01:03-B1*04:01L HLA-DPA1*01:02-B1*04:01L HLA-DRB1*16:01L HLA-DRB1*04:08L
NVVIKVCEFQFCN

SEQ ID NO: 23655 - protein, 12 aa, Severe acute respiratory syndrome coronavirus 2
  REGION 1..12: note = Table B: HLA-DPA1*01:03-B1*04:01L HLA-DPA1*01:03-B1*104:01L
IADYNYKLPDDF

SEQ ID NO: 23656 - protein, 15 aa, Severe acute respiratory syndrome coronavirus 2
  REGION 1..15: note = Table B: HLA-DPA1*01:03-B1*04:01L HLA-DRB1*08:02L
NSVAYSNNSIAIPTN

SEQ ID NO: 23657 - protein, 16 aa, Severe acute respiratory syndrome coronavirus 2
  REGION 1..16: note = Table B: HLA-DPA1*01:03-B1*04:01L
NRALTGIAVEQDKNTQ

SEQ ID NO: 23658 - protein, 13 aa, Severe acute respiratory syndrome coronavirus 2
  REGION 1..13: note = Table B: HLA-DPA1*01:03-B1*04:01L HLA-DRB1*04:08L
SANLAATKMSECV

SEQ ID NO: 23659 - protein, 16 aa, Severe acute respiratory syndrome coronavirus 2
  REGION 1..16: note = Table B: HLA-DPA1*01:03-B1*04:01L HLA-DQA1*05:05-B1*03:116L
GKGYHLMSFPQSAPHG

SEQ ID NO: 23660 - protein, 14 aa, Severe acute respiratory syndrome coronavirus 2
  REGION 1..14: note = Table B: HLA-DPA1*01:03-B1*04:01L HLA-DRB3*01:01L
DISGINASVVNIQK

SEQ ID NO: 23661 - protein, 11 aa, Severe acute respiratory syndrome coronavirus 2
  REGION 1..11: note = Table B: HLA-DPA1*01:03-B1*04:01L HLA-DPA1*01:03-B1*04:02L HLA-DRB1*16:01L
HSYFTSDYYQL

SEQ ID NO: 23662 - protein, 16 aa, Severe acute respiratory syndrome coronavirus 2
  REGION 1..16: note = Table B: HLA-DPA1*01:03-B1*04:01L
DTGVEHVTFFIYNKIV

SEQ ID NO: 23663 - protein, 14 aa, Severe acute respiratory syndrome coronavirus 2
  REGION 1..14: note = Table B: HLA-DPA1*01:03-B1*04:01L HLA-DRB1*07:01L
GDSGFAAYSRYRIG

SEQ ID NO: 23664 - protein, 15 aa, Severe acute respiratory syndrome coronavirus 2
  REGION 1..15: note = Table B: HLA-DPA1*01:03-B1*04:01L HLA-DQA1*05:05-B1*03:116L
IGNYKLNTDHSSSSD

SEQ ID NO: 23665 - protein, 11 aa, Severe acute respiratory syndrome coronavirus 2
  REGION 1..11: note = Table B: HLA-DPA1*01:03-B1*04:01L
FHLVDFQVTIA

SEQ ID NO: 23666 - protein, 18 aa, Severe acute respiratory syndrome coronavirus 2
  REGION 1..18: note = Table B: HLA-DPA1*01:03-B1*04:01L
LPNNTASWFTALTQHGKE

SEQ ID NO: 23667 - protein, 17 aa, Severe acute respiratory syndrome coronavirus 2
  REGION 1..17: note = Table B: HLA-DPA1*01:03-B1*04:01L
GIIWVATEGALNTPKDH

SEQ ID NO: 23668 - protein, 13 aa, Severe acute respiratory syndrome coronavirus 2
  REGION 1..13: note = Table B: HLA-DPA1*01:03-B1*04:01L
GDAALALLLLDRL

SEQ ID NO: 23669 - protein, 18 aa, Severe acute respiratory syndrome coronavirus 2
  REGION 1..18: note = Table B: HLA-DPA1*01:03-B1*04:01L HLA-DPA1*01:03-B1*04:02L HLA-DPA1*01:03-B1*104:01L
ATKAYNVTQAFGRRGPEQ

SEQ ID NO: 23670 - protein, 15 aa, Severe acute respiratory syndrome coronavirus 2
  REGION 1..15: note = Table B: HLA-DPA1*01:03-B1*04:01L HLA-DPA1*01:03-B1*02:01L HLA-DPA1*01:03-B1*104:01L HLA-DQA1*05:05-B1*03:01L
GAIKLDDKDPNFKDQ

SEQ ID NO: 23671 - protein, 18 aa, Severe acute respiratory syndrome coronavirus 2
  REGION 1..18: note = Table B: HLA-DQA1*05:05-B1*03:116L
EHEHEIAWYTERSEKSYE

SEQ ID NO: 23672 - protein, 15 aa, Severe acute respiratory syndrome coronavirus 2
  REGION 1..15: note = Table B: HLA-DQA1*05:05-B1*03:116L HLA-DPA1*01:03-B1*02:01L
IAWYTERSEKSYELQ

SEQ ID NO: 23673 - protein, 14 aa, Severe acute respiratory syndrome coronavirus 2
  REGION 1..14: note = Table B: HLA-DQA1*05:05-B1*03:116L HLA-DRB1*08:02L
INIVGDFKLNEEIA

SEQ ID NO: 23674 - protein, 16 aa, Severe acute respiratory syndrome coronavirus 2
  REGION 1..16: note = Table B: HLA-DQA1*05:05-B1*03:116L
LASFSASTSAFVETVK

SEQ ID NO: 23675 - protein, 16 aa, Severe acute respiratory syndrome coronavirus 2
  REGION 1..16: note = Table B: HLA-DQA1*05:05-B1*03:116L
APKEIIFLEGETLPTE

SEQ ID NO: 23676 - protein, 19 aa, Severe acute respiratory syndrome coronavirus 2
  REGION 1..19: note = Table B: HLA-DQA1*05:05-B1*03:116L
APTKVTFGDDTVIEVQGYK

SEQ ID NO: 23677 - protein, 16 aa, Severe acute respiratory syndrome coronavirus 2
  REGION 1..16: note = Table B: HLA-DQA1*05:05-B1*03:116L
KPLEFGATSAALQPEE

SEQ ID NO: 23678 - protein, 18 aa, Severe acute respiratory syndrome coronavirus 2
  REGION 1..18: note = Table B: HLA-DQA1*05:05-B1*03:116L HLA-DRB1*08:02L
KPTVVVNAANVYLKHGGG

SEQ ID NO: 23679 - protein, 13 aa, Severe acute respiratory syndrome coronavirus 2
  REGION 1..13: note = Table B: HLA-DQA1*05:05-B1*03:116L
GGVAGALNKATNN

SEQ ID NO: 23680 - protein, 18 aa, Severe acute respiratory syndrome coronavirus 2
  REGION 1..18: note = Table B: HLA-DQA1*05:05-B1*03:116L
IQRKYKGIKIQEGVVDYG

SEQ ID NO: 23681 - protein, 18 aa, Severe acute respiratory syndrome coronavirus 2
  REGION 1..18: note = Table B: HLA-DQA1*05:05-B1*03:116L
SYFTEQPIDLVPNQPYPN

SEQ ID NO: 23682 - protein, 15 aa, Severe acute respiratory syndrome coronavirus 2
  REGION 1..15: note = Table B: HLA-DQA1*05:05-B1*03:116L
QPIDLVPNQPYPNAS

SEQ ID NO: 23683 - protein, 16 aa, Severe acute respiratory syndrome coronavirus 2
  REGION 1..16: note = Table B: HLA-DQA1*05:05-B1*03:116L
SNSFDVLKSEDAQGMD

SEQ ID NO: 23684 - protein, 14 aa, Severe acute respiratory syndrome coronavirus 2
  REGION 1..14: note = Table B: HLA-DQA1*05:05-B1*03:116L
FDVLKSEDAQGMDN

SEQ ID NO: 23685 - protein, 16 aa, Severe acute respiratory syndrome coronavirus 2
  REGION 1..16: note = Table B: HLA-DQA1*05:05-B1*03:116L
LSHFVNLDNLRANNTK

SEQ ID NO: 23686 - protein, 17 aa, Severe acute respiratory syndrome coronavirus 2
  REGION 1..17: note = Table B: HLA-DQA1*05:05-B1*03:116L
QPILLLDQALVSDVGDS

SEQ ID NO: 23687 - protein, 14 aa, Severe acute respiratory syndrome coronavirus 2
  REGION 1..14: note = Table B: HLA-DQA1*05:05-B1*03:116L
VNTFSSTFNVPMEK

SEQ ID NO: 23688 - protein, 18 aa, Severe acute respiratory syndrome coronavirus 2
  REGION 1..18: note = Table B: HLA-DQA1*05:05-B1*03:116L
ETKDVVECLKLSHQSDIE

SEQ ID NO: 23689 - protein, 17 aa, Severe acute respiratory syndrome coronavirus 2
  REGION 1..17: note = Table B: HLA-DQA1*05:05-B1*03:116L
DGSIIQFPNTYLEGSVR

SEQ ID NO: 23690 - protein, 16 aa, Severe acute respiratory syndrome coronavirus 2
  REGION 1..16: note = Table B: HLA-DQA1*05:05-B1*03:116L
NDILLAKDTTEAFEKM

SEQ ID NO: 23691 - protein, 16 aa, Severe acute respiratory syndrome coronavirus 2
  REGION 1..16: note = Table B: HLA-DQA1*05:05-B1*03:116L HLA-DPA1*01:03-B1*02:01L
IASEFSSLPSYAAFAT

SEQ ID NO: 23692 - protein, 15 aa, Severe acute respiratory syndrome coronavirus 2
  REGION 1..15: note = Table B: HLA-DQA1*05:05-B1*03:116L HLA-DPA1*01:03-B1*02:01L HLA-DPA1*01:02-B1*04:01L
LPSYAAFATAQEAYE

SEQ ID NO: 23693 - protein, 18 aa, Severe acute respiratory syndrome coronavirus 2
  REGION 1..18: note = Table B: HLA-DQA1*05:05-B1*03:116L
ADSKIVQLSEISMDNSPN

SEQ ID NO: 23694 - protein, 15 aa, Severe acute respiratory syndrome coronavirus 2
  REGION 1..15: note = Table B: HLA-DQA1*05:05-B1*03:116L
TALRANSAVKLQNNE

SEQ ID NO: 23695 - protein, 17 aa, Severe acute respiratory syndrome coronavirus 2
  REGION 1..17: note = Table B: HLA-DQA1*05:05-B1*03:116L
KGKYVQIPTTCANDPVG

SEQ ID NO: 23696 - protein, 15 aa, Severe acute respiratory syndrome coronavirus 2
  REGION 1..15: note = Table B: HLA-DQA1*05:05-B1*03:116L
EETIYNLLKDCPAVA

SEQ ID NO: 23697 - protein, 15 aa, Severe acute respiratory syndrome coronavirus 2
  REGION 1..15: note = Table B: HLA-DQA1*05:05-B1*03:116L
GDFIQTTPGSGVPVV

SEQ ID NO: 23698 - protein, 17 aa, Severe acute respiratory syndrome coronavirus 2
  REGION 1..17: note = Table B: HLA-DQA1*05:05-B1*03:116L
TGYHFRELGVVHNQDVN

SEQ ID NO: 23699 - protein, 14 aa, Severe acute respiratory syndrome coronavirus 2
  REGION 1..14: note = Table B: HLA-DQA1*05:05-B1*03:116L
AADPAMHAASGNLL

SEQ ID NO: 23700 - protein, 18 aa, Severe acute respiratory syndrome coronavirus 2
  REGION 1..18: note = Table B: HLA-DQA1*05:05-B1*03:116L
ADPAMHAASGNLLLDKRT

SEQ ID NO: 23701 - protein, 14 aa, Severe acute respiratory syndrome coronavirus 2
  REGION 1..14: note = Table B: HLA-DQA1*05:05-B1*03:116L
NNVAFQTVKPGNFN

SEQ ID NO: 23702 - protein, 16 aa, Severe acute respiratory syndrome coronavirus 2
  REGION 1..16: note = Table B: HLA-DQA1*05:05-B1*03:116L
LKHFFFAQDGNAAISD

SEQ ID NO: 23703 - protein, 16 aa, Severe acute respiratory syndrome coronavirus 2
  REGION 1..16: note = Table B: HLA-DQA1*05:05-B1*03:116L
ANQVIVNNLDKSAGFP

SEQ ID NO: 23704 - protein, 16 aa, Severe acute respiratory syndrome coronavirus 2
  REGION 1..16: note = Table B: HLA-DQA1*05:05-B1*03:116L
ANSVFNICQAVTANVN

SEQ ID NO: 23705 - protein, 16 aa, Severe acute respiratory syndrome coronavirus 2
  REGION 1..16: note = Table B: HLA-DQA1*05:05-B1*03:116L
VASIKNFKSVLYYQNN

SEQ ID NO: 23706 - protein, 11 aa, Severe acute respiratory syndrome coronavirus 2
  REGION 1..11: note = Table B: HLA-DQA1*05:05-B1*03:116L
KLHDELTGHML

SEQ ID NO: 23707 - protein, 18 aa, Severe acute respiratory syndrome coronavirus 2
  REGION 1..18: note = Table B: HLA-DQA1*05:05-B1*03:116L
TSRYWEPEFYEAMYTPHT

SEQ ID NO: 23708 - protein, 18 aa, Severe acute respiratory syndrome coronavirus 2
  REGION 1..18: note = Table B: HLA-DQA1*05:05-B1*03:116L HLA-DPA1*01:03-B1*02:01L HLA-DRB1*08:03L
YDHVISTSHKLVLSVNPY

SEQ ID NO: 23709 - protein, 15 aa, Severe acute respiratory syndrome coronavirus 2
  REGION 1..15: note = Table B: HLA-DQA1*05:05-B1*03:116L
AGDYILANTCTERLK

SEQ ID NO: 23710 - protein, 11 aa, Severe acute respiratory syndrome coronavirus 2
  REGION 1..11: note = Table B: HLA-DQA1*05:05-B1*03:116L HLA-DQA1*05:05-B1*03:01L
SAPTLVPQEHY

SEQ ID NO: 23711 - protein, 16 aa, Severe acute respiratory syndrome coronavirus 2
  REGION 1..16: note = Table B: HLA-DQA1*05:05-B1*03:116L
SALVYDNKLKAHKDKS

SEQ ID NO: 23712 - protein, 16 aa, Severe acute respiratory syndrome coronavirus 2
  REGION 1..16: note = Table B: HLA-DQA1*05:05-B1*03:116L
KGVITHDVSSAINRPQ

SEQ ID NO: 23713 - protein, 15 aa, Severe acute respiratory syndrome coronavirus 2
  REGION 1..15: note = Table B: HLA-DQA1*05:05-B1*03:116L
SPYNSQNAVASKILG

SEQ ID NO: 23714 - protein, 20 aa, Severe acute respiratory syndrome coronavirus 2
  REGION 1..20: note = Table B: HLA-DQA1*05:05-B1*03:116L
KPPPGDQFKHLIPLMYKGLP

SEQ ID NO: 23715 - protein, 16 aa, Severe acute respiratory syndrome coronavirus 2
  REGION 1..16: note = Table B: HLA-DQA1*05:05-B1*03:116L HLA-DRB1*08:02L
IPLMYKGLPWNVVRIK

SEQ ID NO: 23716 - protein, 16 aa, Severe acute respiratory syndrome coronavirus 2
  REGION 1..16: note = Table B: HLA-DQA1*05:05-B1*03:116L
DVEWKFYDAQPCSDKA

SEQ ID NO: 23717 - protein, 19 aa, Severe acute respiratory syndrome coronavirus 2
  REGION 1..19: note = Table B: HLA-DQA1*05:05-B1*03:116L
KPVPEVKILNNLGVDIAAN

SEQ ID NO: 23718 - protein, 19 aa, Severe acute respiratory syndrome coronavirus 2
  REGION 1..19: note = Table B: HLA-DQA1*05:05-B1*03:116L
PVPEVKILNNLGVDIAANT

SEQ ID NO: 23719 - protein, 14 aa, Severe acute respiratory syndrome coronavirus 2
  REGION 1..14: note = Table B: HLA-DQA1*05:05-B1*03:116L
AFVTNVNASSSEAF

SEQ ID NO: 23720 - protein, 14 aa, Severe acute respiratory syndrome coronavirus 2
  REGION 1..14: note = Table B: HLA-DQA1*05:05-B1*03:116L
SLLIVNNATNVVIK

SEQ ID NO: 23721 - protein, 17 aa, Severe acute respiratory syndrome coronavirus 2
  REGION 1..17: note = Table B: HLA-DQA1*05:05-B1*03:116L HLA-DPA1*01:03-B1*02:01L
LPQGFSALEPLVDLPIG

SEQ ID NO: 23722 - protein, 15 aa, Severe acute respiratory syndrome coronavirus 2
  REGION 1..15: note = Table B: HLA-DQA1*05:05-B1*03:116L
EKGIYQTSNFRVQPT

SEQ ID NO: 23723 - protein, 14 aa, Severe acute respiratory syndrome coronavirus 2
  REGION 1..14: note = Table B: HLA-DQA1*05:05-B1*03:116L
GIYQTSNFRVQPTE

SEQ ID NO: 23724 - protein, 17 aa, Severe acute respiratory syndrome coronavirus 2
  REGION 1..17: note = Table B: HLA-DQA1*05:05-B1*03:116L
TSNFRVQPTESIVRFPN

SEQ ID NO: 23725 - protein, 16 aa, Severe acute respiratory syndrome coronavirus 2
  REGION 1..16: note = Table B: HLA-DQA1*05:05-B1*03:116L
LKPFERDISTEIYQAG

SEQ ID NO: 23726 - protein, 18 aa, Severe acute respiratory syndrome coronavirus 2
  REGION 1..18: note = Table B: HLA-DQA1*05:05-B1*03:116L HLA-DRB1*09:01L
QVKQIYKTPPIKDFGGFN

SEQ ID NO: 23727 - protein, 20 aa, Severe acute respiratory syndrome coronavirus 2
  REGION 1..20: note = Table B: HLA-DQA1*05:05-B1*03:116L
TPPIKDFGGFNFSQILPDPS

SEQ ID NO: 23728 - protein, 17 aa, Severe acute respiratory syndrome coronavirus 2
  REGION 1..17: note = Table B: HLA-DQA1*05:05-B1*03:116L
IQDSLSSTASALGKLQD

SEQ ID NO: 23729 - protein, 14 aa, Severe acute respiratory syndrome coronavirus 2
  REGION 1..14: note = Table B: HLA-DQA1*05:05-B1*03:116L HLA-DPA1*01:02-B1*04:01L
AAEIRASANLAATK

SEQ ID NO: 23730 - protein, 15 aa, Severe acute respiratory syndrome coronavirus 2
  REGION 1..15: note = Table B: HLA-DQA1*05:05-B1*03:116L
VDLGDISGINASVVN

SEQ ID NO: 23731 - protein, 15 aa, Severe acute respiratory syndrome coronavirus 2
  REGION 1..15: note = Table B: HLA-DQA1*05:05-B1*03:116L HLA-DRB3*01:01L
DYYQLYSTQLSTDTG

SEQ ID NO: 23732 - protein, 16 aa, Severe acute respiratory syndrome coronavirus 2
  REGION 1..16: note = Table B: HLA-DQA1*05:05-B1*03:116L
LSYYKLGASQRVAGDS

SEQ ID NO: 23733 - protein, 15 aa, Severe acute respiratory syndrome coronavirus 2
  REGION 1..15: note = Table B: HLA-DQA1*05:05-B1*03:116L
GNYKLNTDHSSSSDN

SEQ ID NO: 23734 - protein, 18 aa, Severe acute respiratory syndrome coronavirus 2
  REGION 1..18: note = Table B: HLA-DQA1*05:05-B1*03:116L
TPSGTWLTYTGAIKLDDK

SEQ ID NO: 23735 - protein, 14 aa, Severe acute respiratory syndrome coronavirus 2
  REGION 1..14: note = Table B: HLA-DQA1*05:05-B1*03:116L HLA-DRB1*08:02L
TYTGAIKLDDKDPN

SEQ ID NO: 23736 - protein, 14 aa, Severe acute respiratory syndrome coronavirus 2
  REGION 1..14: note = Table B: HLA-DRB1*04:10L
LEGIQYGRSGETLG

SEQ ID NO: 23737 - protein, 13 aa, Severe acute respiratory syndrome coronavirus 2
  REGION 1..13: note = Table B: HLA-DRB1*04:10L
YEKLKPVLDWLEE

SEQ ID NO: 23738 - protein, 11 aa, Severe acute respiratory syndrome coronavirus 2
  REGION 1..11: note = Table B: HLA-DRB1*04:10L
GALNKATNNAM

SEQ ID NO: 23739 - protein, 11 aa, Severe acute respiratory syndrome coronavirus 2
  REGION 1..11: note = Table B: HLA-DRB1*04:10L
ALNKATNNAMQ

SEQ ID NO: 23740 - protein, 12 aa, Severe acute respiratory syndrome coronavirus 2
  REGION 1..12: note = Table B: HLA-DRB1*04:10L
EGVLTAVVIPTK

SEQ ID NO: 23741 - protein, 13 aa, Severe acute respiratory syndrome coronavirus 2
  REGION 1..13: note = Table B: HLA-DRB1*04:10L HLA-DRB1*04:08L
SLKITEEVGHTDL

SEQ ID NO: 23742 - protein, 12 aa, Severe acute respiratory syndrome coronavirus 2
  REGION 1..12: note = Table B: HLA-DRB1*04:10L
MPTTIAKNTVKS

SEQ ID NO: 23743 - protein, 12 aa, Severe acute respiratory syndrome coronavirus 2
  REGION 1..12: note = Table B: HLA-DRB1*04:10L HLA-DPA1*03:01-B1*105:01L
VDSVTVKNGSIH

SEQ ID NO: 23744 - protein, 13 aa, Severe acute respiratory syndrome coronavirus 2
  REGION 1..13: note = Table B: HLA-DRB1*04:10L
ELAKNVSLDNVLS

SEQ ID NO: 23745 - protein, 14 aa, Severe acute respiratory syndrome coronavirus 2
  REGION 1..14: note = Table B: HLA-DRB1*04:10L
SAARQGFVDSDVET

SEQ ID NO: 23746 - protein, 12 aa, Severe acute respiratory syndrome coronavirus 2
  REGION 1..12: note = Table B: HLA-DRB1*04:10L HLA-DRB1*04:08L
GPFVDRQTAQAA

SEQ ID NO: 23747 - protein, 14 aa, Severe acute respiratory syndrome coronavirus 2
  REGION 1..14: note = Table B: HLA-DRB1*04:10L HLA-DRB1*04:08L
YEPLTQDHVDILGP

SEQ ID NO: 23748 - protein, 12 aa, Severe acute respiratory syndrome coronavirus 2
  REGION 1..12: note = Table B: HLA-DRB1*04:10L HLA-DRB1*14:54L HLA-DRB1*04:08L
ASEFSSLPSYAA

SEQ ID NO: 23749 - protein, 12 aa, Severe acute respiratory syndrome coronavirus 2
  REGION 1..12: note = Table B: HLA-DRB1*04:10L HLA-DRB1*14:54L
LNIIPLTTAAKL

SEQ ID NO: 23750 - protein, 13 aa, Severe acute respiratory syndrome coronavirus 2
  REGION 1..13: note = Table B: HLA-DRB1*04:10L
ALWEIQQVVDADS

SEQ ID NO: 23751 - protein, 13 aa, Severe acute respiratory syndrome coronavirus 2
  REGION 1..13: note = Table B: HLA-DRB1*04:10L
ANSAVKLQNNELS

SEQ ID NO: 23752 - protein, 13 aa, Severe acute respiratory syndrome coronavirus 2
  REGION 1..13: note = Table B: HLA-DRB1*04:10L HLA-DRB1*08:03L
AESHVDTDLTKPY

SEQ ID NO: 23753 - protein, 12 aa, Severe acute respiratory syndrome coronavirus 2
  REGION 1..12: note = Table B: HLA-DRB1*04:10L
VPFVVSTGYHFR

SEQ ID NO: 23754 - protein, 11 aa, Severe acute respiratory syndrome coronavirus 2
  REGION 1..11: note = Table B: HLA-DRB1*04:10L HLA-DRB1*04:08L
VVHNQDVNLHS

SEQ ID NO: 23755 - protein, 13 aa, Severe acute respiratory syndrome coronavirus 2
  REGION 1..13: note = Table B: HLA-DRB1*04:10L
FAQDGNAAISDYD

SEQ ID NO: 23756 - protein, 13 aa, Severe acute respiratory syndrome coronavirus 2
  REGION 1..13: note = Table B: HLA-DRB1*04:10L
SIAATRGATVVIG

SEQ ID NO: 23757 - protein, 13 aa, Severe acute respiratory syndrome coronavirus 2
  REGION 1..13: note = Table B: HLA-DRB1*04:10L HLA-DRB1*14:54L HLA-DRB1*04:08L
AAETLKATEETFK

SEQ ID NO: 23758 - protein, 12 aa, Severe acute respiratory syndrome coronavirus 2
  REGION 1..12: note = Table B: HLA-DRB1*04:10L
TGYVDTPNNTDF

SEQ ID NO: 23759 - protein, 13 aa, Severe acute respiratory syndrome coronavirus 2
  REGION 1..13: note = Table B: HLA-DRB1*04:10L
GEVPVSIINNTVY

SEQ ID NO: 23760 - protein, 13 aa, Severe acute respiratory syndrome coronavirus 2
  REGION 1..13: note = Table B: HLA-DRB1*04:10L
DGVVQQLPETYFT

SEQ ID NO: 23761 - protein, 13 aa, Severe acute respiratory syndrome coronavirus 2
  REGION 1..13: note = Table B: HLA-DRB1*04:10L HLA-DRB1*12:01L HLA-DPA1*02:01-B1*13:01L HLA-DRB1*08:03L
VETFYPKLQSSQA

SEQ ID NO: 23762 - protein, 14 aa, Severe acute respiratory syndrome coronavirus 2
  REGION 1..14: note = Table B: HLA-DRB1*04:10L HLA-DRB3*01:01L
VLRQWLPTGTLLVD

SEQ ID NO: 23763 - protein, 12 aa, Severe acute respiratory syndrome coronavirus 2
  REGION 1..12: note = Table B: HLA-DRB1*04:10L
KNVTKENDSKEG

SEQ ID NO: 23764 - protein, 13 aa, Severe acute respiratory syndrome coronavirus 2
  REGION 1..13: note = Table B: HLA-DRB1*04:10L HLA-DRB1*08:02L
SVLYNSASFSTFK

SEQ ID NO: 23765 - protein, 13 aa, Severe acute respiratory syndrome coronavirus 2
  REGION 1..13: note = Table B: HLA-DRB1*04:10L HLA-DRB1*12:02L HLA-DRB1*08:03L
SNNLDSKVGGNYN

SEQ ID NO: 23766 - protein, 12 aa, Severe acute respiratory syndrome coronavirus 2
  REGION 1..12: note = Table B: HLA-DRB1*04:10L
WRVYSTGSNVFQ

SEQ ID NO: 23767 - protein, 12 aa, Severe acute respiratory syndrome coronavirus 2
  REGION 1..12: note = Table B: HLA-DRB1*04:10L
RVYSTGSNVFQT

SEQ ID NO: 23768 - protein, 13 aa, Severe acute respiratory syndrome coronavirus 2
  REGION 1..13: note = Table B: HLA-DRB1*04:10L
TTEILPVSMTKTS

SEQ ID NO: 23769 - protein, 11 aa, Severe acute respiratory syndrome coronavirus 2
  REGION 1..11: note = Table B: HLA-DRB1*04:10L HLA-DRB1*14:54L HLA-DRB1*04:08L
SAIGKIQDSLS

SEQ ID NO: 23770 - protein, 13 aa, Severe acute respiratory syndrome coronavirus 2
  REGION 1..13: note = Table B: HLA-DRB1*04:10L
FGAISSVLNDILS

SEQ ID NO: 23771 - protein, 15 aa, Severe acute respiratory syndrome coronavirus 2
  REGION 1..15: note = Table B: HLA-DRB1*04:10L HLA-DPA1*01:03-B1*04:02L HLA-DPA1*01:02-B1*04:01L
GPEQTQGNFGDQELI

SEQ ID NO: 23772 - protein, 11 aa, Severe acute respiratory syndrome coronavirus 2
  REGION 1..11: note = Table B: HLA-DRB1*04:10L
AYKTFPPTEPK

SEQ ID NO: 23773 - protein, 16 aa, Severe acute respiratory syndrome coronavirus 2
  REGION 1..16: note = Table B: HLA-DRB1*09:01L HLA-DPA1*01:03-B1*104:01L HLA-DRB1*07:01L
GHSYGADLKSFDLGDE

SEQ ID NO: 23774 - protein, 14 aa, Severe acute respiratory syndrome coronavirus 2
  REGION 1..14: note = Table B: HLA-DRB1*09:01L
MGRIRSVYPVASPN

SEQ ID NO: 23775 - protein, 15 aa, Severe acute respiratory syndrome coronavirus 2
  REGION 1..15: note = Table B: HLA-DRB1*09:01L
ADSIIIGGAKLKALN

SEQ ID NO: 23776 - protein, 14 aa, Severe acute respiratory syndrome coronavirus 2
  REGION 1..14: note = Table B: HLA-DRB1*09:01L HLA-DRB1*07:01L
EDIQLLKSAYENFN

SEQ ID NO: 23777 - protein, 12 aa, Severe acute respiratory syndrome coronavirus 2
  REGION 1..12: note = Table B: HLA-DRB1*09:01L
ITTYPGQGLNGY

SEQ ID NO: 23778 - protein, 17 aa, Severe acute respiratory syndrome coronavirus 2
  REGION 1..17: note = Table B: HLA-DRB1*09:01L HLA-DPA1*01:03-B1*04:02L
SPDAVTAYNGYLTSSSK

SEQ ID NO: 23779 - protein, 16 aa, Severe acute respiratory syndrome coronavirus 2
  REGION 1..16: note = Table B: HLA-DRB1*09:01L
GSIHLYFDKAGQKTYE

SEQ ID NO: 23780 - protein, 17 aa, Severe acute respiratory syndrome coronavirus 2
  REGION 1..17: note = Table B: HLA-DRB1*09:01L HLA-DPA1*01:03-B1*02:01L HLA-DPA1*01:03-B1*104:01L HLA-DQA1*05:05-B1*03:01L
LPINVIVFDGKSKCEES

SEQ ID NO: 23781 - protein, 17 aa, Severe acute respiratory syndrome coronavirus 2
  REGION 1..17: note = Table B: HLA-DRB1*09:01L
PINVIVFDGKSKCEESS

SEQ ID NO: 23782 - protein, 16 aa, Severe acute respiratory syndrome coronavirus 2
  REGION 1..16: note = Table B: HLA-DRB1*09:01L HLA-DRB3*01:01L
TQDHVDILGPLSAQTG

SEQ ID NO: 23783 - protein, 11 aa, Severe acute respiratory syndrome coronavirus 2
  REGION 1..11: note = Table B: HLA-DRB1*09:01L HLA-DPA1*01:03-B1*104:01L
AYYNTTKGGRF

SEQ ID NO: 23784 - protein, 17 aa, Severe acute respiratory syndrome coronavirus 2
  REGION 1..17: note = Table B: HLA-DRB1*09:01L
DLQDLKWARFPKSDGTG

SEQ ID NO: 23785 - protein, 14 aa, Severe acute respiratory syndrome coronavirus 2
  REGION 1..14: note = Table B: HLA-DRB1*09:01L
TDVVYRAFDIYNDK

SEQ ID NO: 23786 - protein, 15 aa, Severe acute respiratory syndrome coronavirus 2
  REGION 1..15: note = Table B: HLA-DRB1*09:01L
FDRYFKYWDQTYHPN

SEQ ID NO: 23787 - protein, 19 aa, Severe acute respiratory syndrome coronavirus 2
  REGION 1..19: note = Table B: HLA-DRB1*09:01L
LPAPRTLLTKGTLEPEYFN

SEQ ID NO: 23788 - protein, 15 aa, Severe acute respiratory syndrome coronavirus 2
  REGION 1..15: note = Table B: HLA-DRB1*09:01L HLA-DRB1*07:01L
LPTQTVDSSQGSEYD

SEQ ID NO: 23789 - protein, 13 aa, Severe acute respiratory syndrome coronavirus 2
  REGION 1..13: note = Table B: HLA-DRB1*09:01L HLA-DRB1*12:02L
FTRLQSLENVAFN

SEQ ID NO: 23790 - protein, 12 aa, Severe acute respiratory syndrome coronavirus 2
  REGION 1..12: note = Table B: HLA-DRB1*09:01L
ELFENKTTLPVN

SEQ ID NO: 23791 - protein, 16 aa, Severe acute respiratory syndrome coronavirus 2
  REGION 1..16: note = Table B: HLA-DRB1*09:01L
GRLIIRENNRVVISSD

SEQ ID NO: 23792 - protein, 14 aa, Severe acute respiratory syndrome coronavirus 2
  REGION 1..14: note = Table B: HLA-DRB1*09:01L HLA-DQA1*05:05-B1*03:01L HLA-DRB1*15:01L
TQNVLYENQKLIAN

SEQ ID NO: 23793 - protein, 13 aa, Severe acute respiratory syndrome coronavirus 2
  REGION 1..13: note = Table B: HLA-DRB1*09:01L HLA-DPA1*01:03-B1*104:01L HLA-DRB1*07:01L
LNTLVKQLSSNFG

SEQ ID NO: 23794 - protein, 18 aa, Severe acute respiratory syndrome coronavirus 2
  REGION 1..18: note = Table B: HLA-DPA1*01:03-B1*04:02L HLA-DPA1*01:03-B1*104:01L
VPGFNEKTHVQLSLPVLQ

SEQ ID NO: 23795 - protein, 18 aa, Severe acute respiratory syndrome coronavirus 2
  REGION 1..18: note = Table B: HLA-DPA1*01:03-B1*04:02L
EKTHVQLSLPVLQVRDVL

SEQ ID NO: 23796 - protein, 15 aa, Severe acute respiratory syndrome coronavirus 2
  REGION 1..15: note = Table B: HLA-DPA1*01:03-B1*04:02L
MGRIRSVYPVASPNE

SEQ ID NO: 23797 - protein, 18 aa, Severe acute respiratory syndrome coronavirus 2
  REGION 1..18: note = Table B: HLA-DPA1*01:03-B1*04:02L HLA-DQA1*03:01-B1*03:02L HLA-DQA1*05:05-B1*03:01L HLA-DQA1*01:03-B1*06:01L
AVVKIYCPACHNSEVGPE

SEQ ID NO: 23798 - protein, 18 aa, Severe acute respiratory syndrome coronavirus 2
  REGION 1..18: note = Table B: HLA-DPA1*01:03-B1*04:02L
GPEHSLAEYHNESGLKTI

SEQ ID NO: 23799 - protein, 12 aa, Severe acute respiratory syndrome coronavirus 2
  REGION 1..12: note = Table B: HLA-DPA1*01:03-B1*04:02L HLA-DPA1*03:01-B1*105:01L HLA-DQA1*05:05-B1*03:01L HLA-DQA1*01:03-B1*06:01L
IAFGGCVFSYVG

SEQ ID NO: 23800 - protein, 15 aa, Severe acute respiratory syndrome coronavirus 2
  REGION 1..15: note = Table B: HLA-DPA1*01:03-B1*04:02L
IAIILASFSASTSAF

SEQ ID NO: 23801 - protein, 14 aa, Severe acute respiratory syndrome coronavirus 2
  REGION 1..14: note = Table B: HLA-DPA1*01:03-B1*04:02L HLA-DPA1*01:03-B1*104:01L
ILASFSASTSAFVE

SEQ ID NO: 23802 - protein, 16 aa, Severe acute respiratory syndrome coronavirus 2
  REGION 1..16: note = Table B: HLA-DPA1*01:03-B1*04:02L
TNNLVVMAYITGGVVQ

SEQ ID NO: 23803 - protein, 12 aa, Severe acute respiratory syndrome coronavirus 2
  REGION 1..12: note = Table B: HLA-DPA1*01:03-B1*04:02L
ITGGVVQLTSQW

SEQ ID NO: 23804 - protein, 16 aa, Severe acute respiratory syndrome coronavirus 2
  REGION 1..16: note = Table B: HLA-DPA1*01:03-B1*04:02L
TGDLQPLEQPTSEAVE

SEQ ID NO: 23805 - protein, 15 aa, Severe acute respiratory syndrome coronavirus 2
  REGION 1..15: note = Table B: HLA-DPA1*01:03-B1*04:02L
KVTFGDDTVIEVQGY

SEQ ID NO: 23806 - protein, 16 aa, Severe acute respiratory syndrome coronavirus 2
  REGION 1..16: note = Table B: HLA-DPA1*01:03-B1*04:02L HLA-DPA1*01:03-B1*104:01L
YLKLTDNVYIKNADIV

SEQ ID NO: 23807 - protein, 16 aa, Severe acute respiratory syndrome coronavirus 2
  REGION 1..16: note = Table B: HLA-DPA1*01:03-B1*04:02L
GDVVQEGVLTAVVIPT

SEQ ID NO: 23808 - protein, 15 aa, Severe acute respiratory syndrome coronavirus 2
  REGION 1..15: note = Table B: HLA-DPA1*01:03-B1*04:02L
KQEILGTVSWNLREM

SEQ ID NO: 23809 - protein, 13 aa, Severe acute respiratory syndrome coronavirus 2
  REGION 1..13: note = Table B: HLA-DPA1*01:03-B1*04:02L
VITFDNLKTLLSL

SEQ ID NO: 23810 - protein, 11 aa, Severe acute respiratory syndrome coronavirus 2
  REGION 1..11: note = Table B: HLA-DPA1*01:03-B1*04:02L
YLATALLTLQQ

SEQ ID NO: 23811 - protein, 16 aa, Severe acute respiratory syndrome coronavirus 2
  REGION 1..16: note = Table B: HLA-DPA1*01:03-B1*04:02L
ALLTLQQIELKFNPPA

SEQ ID NO: 23812 - protein, 15 aa, Severe acute respiratory syndrome coronavirus 2
  REGION 1..15: note = Table B: HLA-DPA1*01:03-B1*04:02L
DVFYKENSYTTTIKP

SEQ ID NO: 23813 - protein, 17 aa, Severe acute respiratory syndrome coronavirus 2
  REGION 1..17: note = Table B: HLA-DPA1*01:03-B1*04:02L
QPYPNASFDNFKFVCDN

SEQ ID NO: 23814 - protein, 13 aa, Severe acute respiratory syndrome coronavirus 2
  REGION 1..13: note = Table B: HLA-DPA1*01:03-B1*04:02L
NLACEDLKPVSEE

SEQ ID NO: 23815 - protein, 18 aa, Severe acute respiratory syndrome coronavirus 2
  REGION 1..18: note = Table B: HLA-DPA1*01:03-B1*04:02L
ENPTIQKDVLECNVKTTE

SEQ ID NO: 23816 - protein, 20 aa, Severe acute respiratory syndrome coronavirus 2
  REGION 1..20: note = Table B: HLA-DPA1*01:03-B1*04:02L HLA-DPA1*01:03-B1*104:01L
NPTIQKDVLECNVKTTEVVG

SEQ ID NO: 23817 - protein, 16 aa, Severe acute respiratory syndrome coronavirus 2
  REGION 1..16: note = Table B: HLA-DPA1*01:03-B1*04:02L HLA-DPA1*01:03-B1*104:01L
LSRVLGLKTLATHGLA

SEQ ID NO: 23818 - protein, 15 aa, Severe acute respiratory syndrome coronavirus 2
  REGION 1..15: note = Table B: HLA-DPA1*01:03-B1*04:02L
DTIANYAKPFLNKVV

SEQ ID NO: 23819 - protein, 16 aa, Severe acute respiratory syndrome coronavirus 2
  REGION 1..16: note = Table B: HLA-DPA1*01:03-B1*04:02L
MPYFFTLLLQLCTFTR

SEQ ID NO: 23820 - protein, 13 aa, Severe acute respiratory syndrome coronavirus 2
  REGION 1..13: note = Table B: HLA-DPA1*01:03-B1*04:02L
LLLQLCTFTRSTN

SEQ ID NO: 23821 - protein, 13 aa, Severe acute respiratory syndrome coronavirus 2
  REGION 1..13: note = Table B: HLA-DPA1*01:03-B1*04:02L HLA-DRB1*04:08L
IQITISSFKWDLT

SEQ ID NO: 23822 - protein, 12 aa, Severe acute respiratory syndrome coronavirus 2
  REGION 1..12: note = Table B: HLA-DPA1*01:03-B1*04:02L
SFKWDLTAFGLV

SEQ ID NO: 23823 - protein, 12 aa, Severe acute respiratory syndrome coronavirus 2
  REGION 1..12: note = Table B: HLA-DPA1*01:03-B1*04:02L
LAYILFTRFFYV

SEQ ID NO: 23824 - protein, 12 aa, Severe acute respiratory syndrome coronavirus 2
  REGION 1..12: note = Table B: HLA-DPA1*01:03-B1*04:02L HLA-DPA1*01:02-B1*04:01L
VHFISNSWLMWL

SEQ ID NO: 23825 - protein, 17 aa, Severe acute respiratory syndrome coronavirus 2
  REGION 1..17: note = Table B: HLA-DPA1*01:03-B1*04:02L HLA-DRB1*08:02L
VARDLSLQFKRPINPTD

SEQ ID NO: 23826 - protein, 14 aa, Severe acute respiratory syndrome coronavirus 2
  REGION 1..14: note = Table B: HLA-DPA1*01:03-B1*04:02L HLA-DRB1*15:03L
SQLMCQPILLLDQA

SEQ ID NO: 23827 - protein, 18 aa, Severe acute respiratory syndrome coronavirus 2
  REGION 1..18: note = Table B: HLA-DPA1*01:03-B1*04:02L
FNVPMEKLKTLVATAEAE

SEQ ID NO: 23828 - protein, 14 aa, Severe acute respiratory syndrome coronavirus 2
  REGION 1..14: note = Table B: HLA-DPA1*01:03-B1*04:02L HLA-DRB3*01:01L HLA-DPA1*01:03-B1*104:01L HLA-DRB1*08:03L
VLSTFISAARQGFV

SEQ ID NO: 23829 - protein, 11 aa, Severe acute respiratory syndrome coronavirus 2
  REGION 1..11: note = Table B: HLA-DPA1*01:03-B1*04:02L HLA-DPA1*03:01-B1*105:01L
WNVKDFMSLSE

SEQ ID NO: 23830 - protein, 16 aa, Severe acute respiratory syndrome coronavirus 2
  REGION 1..16: note = Table B: HLA-DPA1*01:03-B1*04:02L
PNTYLEGSVRVVTTFD

SEQ ID NO: 23831 - protein, 12 aa, Severe acute respiratory syndrome coronavirus 2
  REGION 1..12: note = Table B: HLA-DPA1*01:03-B1*04:02L HLA-DPA1*03:01-B1*105:01L HLA-DQA1*03:01-B1*03:02L
IVAGGIVAIVVT

SEQ ID NO: 23832 - protein, 14 aa, Severe acute respiratory syndrome coronavirus 2
  REGION 1..14: note = Table B: HLA-DPA1*01:03-B1*04:02L
SHVVAFNTLLFLMS

SEQ ID NO: 23833 - protein, 14 aa, Severe acute respiratory syndrome coronavirus 2
  REGION 1..14: note = Table B: HLA-DPA1*01:03-B1*04:02L
VVAFNTLLFLMSFT

SEQ ID NO: 23834 - protein, 16 aa, Severe acute respiratory syndrome coronavirus 2
  REGION 1..16: note = Table B: HLA-DPA1*01:03-B1*04:02L
VPFWITIAYIICISTK

SEQ ID NO: 23835 - protein, 14 aa, Severe acute respiratory syndrome coronavirus 2
  REGION 1..14: note = Table B: HLA-DPA1*01:03-B1*04:02L
WITIAYIICISTKH

SEQ ID NO: 23836 - protein, 15 aa, Severe acute respiratory syndrome coronavirus 2
  REGION 1..15: note = Table B: HLA-DPA1*01:03-B1*04:02L HLA-DPA1*02:01-B1*13:01L
HFYWFFSNYLKRRVV

SEQ ID NO: 23837 - protein, 12 aa, Severe acute respiratory syndrome coronavirus 2
  REGION 1..12: note = Table B: HLA-DPA1*01:03-B1*04:02L HLA-DPA1*01:02-B1*04:01L
STFEEAALCTFL

SEQ ID NO: 23838 - protein, 14 aa, Severe acute respiratory syndrome coronavirus 2
  REGION 1..14: note = Table B: HLA-DPA1*01:03-B1*04:02L
TFEEAALCTFLLNK

SEQ ID NO: 23839 - protein, 12 aa, Severe acute respiratory syndrome coronavirus 2
  REGION 1..12: note = Table B: HLA-DPA1*01:03-B1*04:02L HLA-DQA1*02:01-B1*03:03L
EAALCTFLLNKE

SEQ ID NO: 23840 - protein, 16 aa, Severe acute respiratory syndrome coronavirus 2
  REGION 1..16: note = Table B: HLA-DPA1*01:03-B1*04:02L
LALYNKYKYFSGAMDT

SEQ ID NO: 23841 - protein, 17 aa, Severe acute respiratory syndrome coronavirus 2
  REGION 1..17: note = Table B: HLA-DPA1*01:03-B1*04:02L
TTSYREAACCHLAKALN

SEQ ID NO: 23842 - protein, 14 aa, Severe acute respiratory syndrome coronavirus 2
  REGION 1..14: note = Table B: HLA-DPA1*01:03-B1*04:02L
GLWLDDVVYCPRHV

SEQ ID NO: 23843 - protein, 16 aa, Severe acute respiratory syndrome coronavirus 2
  REGION 1..16: note = Table B: HLA-DPA1*01:03-B1*04:02L
VQLRVIGHSMQNCVLK

SEQ ID NO: 23844 - protein, 14 aa, Severe acute respiratory syndrome coronavirus 2
  REGION 1..14: note = Table B: HLA-DPA1*01:03-B1*04:02L HLA-DQA1*05:05-B1*03:01L
RPNFTIKGSFLNGS

SEQ ID NO: 23845 - protein, 12 aa, Severe acute respiratory syndrome coronavirus 2
  REGION 1..12: note = Table B: HLA-DPA1*01:03-B1*04:02L
NIDYDCVSFCYM

SEQ ID NO: 23846 - protein, 12 aa, Severe acute respiratory syndrome coronavirus 2
  REGION 1..12: note = Table B: HLA-DPA1*01:03-B1*04:02L HLA-DRB1*15:03L
LYENAFLPFAMG

SEQ ID NO: 23847 - protein, 16 aa, Severe acute respiratory syndrome coronavirus 2
  REGION 1..16: note = Table B: HLA-DPA1*01:03-B1*04:02L
IIAMSAFAMMFVKHKH

SEQ ID NO: 23848 - protein, 13 aa, Severe acute respiratory syndrome coronavirus 2
  REGION 1..13: note = Table B: HLA-DPA1*01:03-B1*04:02L
LPSLATVAYFNMV

SEQ ID NO: 23849 - protein, 13 aa, Severe acute respiratory syndrome coronavirus 2
  REGION 1..13: note = Table B: HLA-DPA1*01:03-B1*04:02L
MVYMPASWVMRIM

SEQ ID NO: 23850 - protein, 15 aa, Severe acute respiratory syndrome coronavirus 2
  REGION 1..15: note = Table B: HLA-DPA1*01:03-B1*04:02L
SWVMRIMTWLDMVDT

SEQ ID NO: 23851 - protein, 16 aa, Severe acute respiratory syndrome coronavirus 2
  REGION 1..16: note = Table B: HLA-DPA1*01:03-B1*04:02L
VESSSKLWAQCVQLHN

SEQ ID NO: 23852 - protein, 14 aa, Severe acute respiratory syndrome coronavirus 2
  REGION 1..14: note = Table B: HLA-DPA1*01:03-B1*04:02L
ILLAKDTTEAFEKM

SEQ ID NO: 23853 - protein, 15 aa, Severe acute respiratory syndrome coronavirus 2
  REGION 1..15: note = Table B: HLA-DPA1*01:03-B1*04:02L
DINKLCEEMLDNRAT

SEQ ID NO: 23854 - protein, 14 aa, Severe acute respiratory syndrome coronavirus 2
  REGION 1..14: note = Table B: HLA-DPA1*01:03-B1*04:02L HLA-DQA1*05:05-B1*03:01L HLA-DRB1*15:03L
LQAIASEFSSLPSY

SEQ ID NO: 23855 - protein, 14 aa, Severe acute respiratory syndrome coronavirus 2
  REGION 1..14: note = Table B: HLA-DPA1*01:03-B1*04:02L
AIASEFSSLPSYAA

SEQ ID NO: 23856 - protein, 14 aa, Severe acute respiratory syndrome coronavirus 2
  REGION 1..14: note = Table B: HLA-DPA1*01:03-B1*04:02L HLA-DPA1*01:03-B1*104:01L
SLPSYAAFATAQEA

SEQ ID NO: 23857 - protein, 14 aa, Severe acute respiratory syndrome coronavirus 2
  REGION 1..14: note = Table B: HLA-DPA1*01:03-B1*04:02L HLA-DRB3*01:01L HLA-DPA1*01:03-B1*104:01L HLA-DRB1*08:02L
QEAYEQAVANGDSE

SEQ ID NO: 23858 - protein, 14 aa, Severe acute respiratory syndrome coronavirus 2
  REGION 1..14: note = Table B: HLA-DPA1*01:03-B1*04:02L HLA-DPA1*01:03-B1*104:01L
AYEQAVANGDSEVV

SEQ ID NO: 23859 - protein, 15 aa, Severe acute respiratory syndrome coronavirus 2
  REGION 1..15: note = Table B: HLA-DPA1*01:03-B1*04:02L HLA-DRB1*08:02L
LNNIINNARDGCVPL

SEQ ID NO: 23860 - protein, 14 aa, Severe acute respiratory syndrome coronavirus 2
  REGION 1..14: note = Table B: HLA-DPA1*01:03-B1*04:02L HLA-DRB3*01:01L HLA-DPA1*01:03-B1*104:01L
ALWEIQQVVDADSK

SEQ ID NO: 23861 - protein, 14 aa, Severe acute respiratory syndrome coronavirus 2
  REGION 1..14: note = Table B: HLA-DPA1*01:03-B1*04:02L HLA-DPA1*02:01-B1*13:01L
EETIYNLLKDCPAV

SEQ ID NO: 23862 - protein, 18 aa, Severe acute respiratory syndrome coronavirus 2
  REGION 1..18: note = Table B: HLA-DPA1*01:03-B1*04:02L HLA-DPA1*01:03-B1*104:01L
IDGDMVPHISRQRLTKYT

SEQ ID NO: 23863 - protein, 13 aa, Severe acute respiratory syndrome coronavirus 2
  REGION 1..13: note = Table B: HLA-DPA1*01:03-B1*04:02L HLA-DPA1*01:02-B1*04:01L
LTKYTMADLVYAL

SEQ ID NO: 23864 - protein, 14 aa, Severe acute respiratory syndrome coronavirus 2
  REGION 1..14: note = Table B: HLA-DPA1*01:03-B1*04:02L
GNWYDFGDFIQTTP

SEQ ID NO: 23865 - protein, 14 aa, Severe acute respiratory syndrome coronavirus 2
  REGION 1..14: note = Table B: HLA-DPA1*01:03-B1*04:02L HLA-DRB1*15:03L
PYIKWDLLKYDFTE

SEQ ID NO: 23866 - protein, 13 aa, Severe acute respiratory syndrome coronavirus 2
  REGION 1..13: note = Table B: HLA-DPA1*01:03-B1*04:02L
FNVLFSTVFPPTS

SEQ ID NO: 23867 - protein, 18 aa, Severe acute respiratory syndrome coronavirus 2
  REGION 1..18: note = Table B: HLA-DPA1*01:03-B1*04:02L
ELGVVHNQDVNLHSSRLS

SEQ ID NO: 23868 - protein, 15 aa, Severe acute respiratory syndrome coronavirus 2
  REGION 1..15: note = Table B: HLA-DPA1*01:03-B1*04:02L
SSVELKHFFFAQDGN

SEQ ID NO: 23869 - protein, 16 aa, Severe acute respiratory syndrome coronavirus 2
  REGION 1..16: note = Table B: HLA-DPA1*01:03-B1*04:02L
SVELKHFFFAQDGNAA

SEQ ID NO: 23870 - protein, 15 aa, Severe acute respiratory syndrome coronavirus 2
  REGION 1..15: note = Table B: HLA-DPA1*01:03-B1*04:02L
RLYYDSMSYEDQDAL

SEQ ID NO: 23871 - protein, 17 aa, Severe acute respiratory syndrome coronavirus 2
  REGION 1..17: note = Table B: HLA-DPA1*01:03-B1*04:02L
TKRNVIPTITQMNLKYA

SEQ ID NO: 23872 - protein, 17 aa, Severe acute respiratory syndrome coronavirus 2
  REGION 1..17: note = Table B: HLA-DPA1*01:03-B1*04:02L
HQKLLKSIAATRGATVV

SEQ ID NO: 23873 - protein, 12 aa, Severe acute respiratory syndrome coronavirus 2
  REGION 1..12: note = Table B: HLA-DPA1*01:03-B1*04:02L
YANSVFNICQAV

SEQ ID NO: 23874 - protein, 12 aa, Severe acute respiratory syndrome coronavirus 2
  REGION 1..12: note = Table B: HLA-DPA1*01:03-B1*04:02L
DTDFVNEFYAYL

SEQ ID NO: 23875 - protein, 16 aa, Severe acute respiratory syndrome coronavirus 2
  REGION 1..16: note = Table B: HLA-DPA1*01:03-B1*04:02L
AYLRKHFSMMILSDDA

SEQ ID NO: 23876 - protein, 15 aa, Severe acute respiratory syndrome coronavirus 2
  REGION 1..15: note = Table B: HLA-DPA1*01:03-B1*04:02L
SMMILSDDAVVCFNS

SEQ ID NO: 23877 - protein, 14 aa, Severe acute respiratory syndrome coronavirus 2
  REGION 1..14: note = Table B: HLA-DPA1*01:03-B1*04:02L
VSLAIDAYPLTKHP

SEQ ID NO: 23878 - protein, 11 aa, Severe acute respiratory syndrome coronavirus 2
  REGION 1..11: note = Table B: HLA-DPA1*01:03-B1*04:02L
YADVFHLYLQY

SEQ ID NO: 23879 - protein, 16 aa, Severe acute respiratory syndrome coronavirus 2
  REGION 1..16: note = Table B: HLA-DPA1*01:03-B1*04:02L
HLYLQYIRKLHDELTG

SEQ ID NO: 23880 - protein, 18 aa, Severe acute respiratory syndrome coronavirus 2
  REGION 1..18: note = Table B: HLA-DPA1*01:03-B1*04:02L
TPHTVLQAVGACVLCNSQ

SEQ ID NO: 23881 - protein, 16 aa, Severe acute respiratory syndrome coronavirus 2
  REGION 1..16: note = Table B: HLA-DPA1*01:03-B1*04:02L
YDHVISTSHKLVLSVN

SEQ ID NO: 23882 - protein, 15 aa, Severe acute respiratory syndrome coronavirus 2
  REGION 1..15: note = Table B: HLA-DPA1*01:03-B1*04:02L HLA-DRB1*15:03L
DNVTDFNAIATCDWT

SEQ ID NO: 23883 - protein, 14 aa, Severe acute respiratory syndrome coronavirus 2
  REGION 1..14: note = Table B: HLA-DPA1*01:03-B1*04:02L
NAIATCDWTNAGDY

SEQ ID NO: 23884 - protein, 16 aa, Severe acute respiratory syndrome coronavirus 2
  REGION 1..16: note = Table B: HLA-DPA1*01:03-B1*04:02L
EETFKLSYGIATVREV

SEQ ID NO: 23885 - protein, 16 aa, Severe acute respiratory syndrome coronavirus 2
  REGION 1..16: note = Table B: HLA-DPA1*01:03-B1*04:02L
ETFKLSYGIATVREVL

SEQ ID NO: 23886 - protein, 14 aa, Severe acute respiratory syndrome coronavirus 2
  REGION 1..14: note = Table B: HLA-DPA1*01:03-B1*04:02L HLA-DPA1*01:03-B1*02:01L HLA-DRB1*07:01L HLA-DRB1*08:02L
ALVYDNKLKAHKDK

SEQ ID NO: 23887 - protein, 14 aa, Severe acute respiratory syndrome coronavirus 2
  REGION 1..14: note = Table B: HLA-DPA1*01:03-B1*04:02L HLA-DRB1*08:02L
SPYNSQNAVASKIL

SEQ ID NO: 23888 - protein, 17 aa, Severe acute respiratory syndrome coronavirus 2
  REGION 1..17: note = Table B: HLA-DPA1*01:03-B1*04:02L HLA-DPA1*01:03-B1*104:01L HLA-DQA1*05:05-B1*03:01L
LPWNVVRIKIVQMLSDT

SEQ ID NO: 23889 - protein, 18 aa, Severe acute respiratory syndrome coronavirus 2
  REGION 1..18: note = Table B: HLA-DPA1*01:03-B1*04:02L
IGDELKINAACRKVQHMV

SEQ ID NO: 23890 - protein, 17 aa, Severe acute respiratory syndrome coronavirus 2
  REGION 1..17: note = Table B: HLA-DPA1*01:03-B1*04:02L
VNKHAFHTPAFDKSAFV

SEQ ID NO: 23891 - protein, 15 aa, Severe acute respiratory syndrome coronavirus 2
  REGION 1..15: note = Table B: HLA-DPA1*01:03-B1*04:02L
NMMISAGFSLWVYKQ

SEQ ID NO: 23892 - protein, 14 aa, Severe acute respiratory syndrome coronavirus 2
  REGION 1..14: note = Table B: HLA-DPA1*01:03-B1*04:02L HLA-DPA1*02:01-B1*13:01L HLA-DPA1*01:03-B1*104:01L
ILNNLGVDIAANTV

SEQ ID NO: 23893 - protein, 13 aa, Severe acute respiratory syndrome coronavirus 2
  REGION 1..13: note = Table B: HLA-DPA1*01:03-B1*04:02L
AFEHIVYGDFSHS

SEQ ID NO: 23894 - protein, 13 aa, Severe acute respiratory syndrome coronavirus 2
  REGION 1..13: note = Table B: HLA-DPA1*01:03-B1*04:02L
VYGDFSHSQLGGL

SEQ ID NO: 23895 - protein, 11 aa, Severe acute respiratory syndrome coronavirus 2
  REGION 1..11: note = Table B: HLA-DPA1*01:03-B1*04:02L
FELEDFIPMDS

SEQ ID NO: 23896 - protein, 15 aa, Severe acute respiratory syndrome coronavirus 2
  REGION 1..15: note = Table B: HLA-DPA1*01:03-B1*04:02L
VSKVVKVTIDYTEIS

SEQ ID NO: 23897 - protein, 14 aa, Severe acute respiratory syndrome coronavirus 2
  REGION 1..14: note = Table B: HLA-DPA1*01:03-B1*04:02L
YLNTLTLAVPYNMR

SEQ ID NO: 23898 - protein, 16 aa, Severe acute respiratory syndrome coronavirus 2
  REGION 1..16: note = Table B: HLA-DPA1*01:03-B1*04:02L
VSDADSTLIGDCATVH

SEQ ID NO: 23899 - protein, 18 aa, Severe acute respiratory syndrome coronavirus 2
  REGION 1..18: note = Table B: HLA-DPA1*01:03-B1*04:02L
TANKWDLIISDMYDPKTK

SEQ ID NO: 23900 - protein, 14 aa, Severe acute respiratory syndrome coronavirus 2
  REGION 1..14: note = Table B: HLA-DPA1*01:03-B1*04:02L
FFTYICGFIQQKLA

SEQ ID NO: 23901 - protein, 11 aa, Severe acute respiratory syndrome coronavirus 2
  REGION 1..11: note = Table B: HLA-DPA1*01:03-B1*04:02L HLA-DRB1*12:01L HLA-DRB1*16:01L
HSWNADLYKLM

SEQ ID NO: 23902 - protein, 12 aa, Severe acute respiratory syndrome coronavirus 2
  REGION 1..12: note = Table B: HLA-DPA1*01:03-B1*04:02L
WNADLYKLMGHF

SEQ ID NO: 23903 - protein, 13 aa, Severe acute respiratory syndrome coronavirus 2
  REGION 1..13: note = Table B: HLA-DPA1*01:03-B1*04:02L HLA-DPA1*01:03-B1*104:01L HLA-DPA1*01:02-B1*04:01L
FVTNVNASSSEAF

SEQ ID NO: 23904 - protein, 15 aa, Severe acute respiratory syndrome coronavirus 2
  REGION 1..15: note = Table B: HLA-DPA1*01:03-B1*04:02L HLA-DPA1*01:03-B1*104:01L HLA-DRB1*04:08L
VTNVNASSSEAFLIG

SEQ ID NO: 23905 - protein, 15 aa, Severe acute respiratory syndrome coronavirus 2
  REGION 1..15: note = Table B: HLA-DPA1*01:03-B1*04:02L
AFLIGCNYLGKPREQ

SEQ ID NO: 23906 - protein, 15 aa, Severe acute respiratory syndrome coronavirus 2
  REGION 1..15: note = Table B: HLA-DPA1*01:03-B1*04:02L
VLHSTQDLFLPFFSN

SEQ ID NO: 23907 - protein, 13 aa, Severe acute respiratory syndrome coronavirus 2
  REGION 1..13: note = Table B: HLA-DPA1*01:03-B1*04:02L
LPFFSNVTWFHAI

SEQ ID NO: 23908 - protein, 12 aa, Severe acute respiratory syndrome coronavirus 2
  REGION 1..12: note = Table B: HLA-DPA1*01:03-B1*04:02L HLA-DRB1*15:03L
NIIRGWIFGTTL

SEQ ID NO: 23909 - protein, 12 aa, Severe acute respiratory syndrome coronavirus 2
  REGION 1..12: note = Table B: HLA-DPA1*01:03-B1*04:02L
WMESEFRVYSSA

SEQ ID NO: 23910 - protein, 16 aa, Severe acute respiratory syndrome coronavirus 2
  REGION 1..16: note = Table B: HLA-DPA1*01:03-B1*04:02L
SQPFLMDLEGKQGNFK

SEQ ID NO: 23911 - protein, 18 aa, Severe acute respiratory syndrome coronavirus 2
  REGION 1..18: note = Table B: HLA-DPA1*01:03-B1*04:02L
VFKNIDGYFKIYSKHTPI

SEQ ID NO: 23912 - protein, 16 aa, Severe acute respiratory syndrome coronavirus 2
  REGION 1..16: note = Table B: HLA-DPA1*01:03-B1*04:02L
RKRISNCVADYSVLYN

SEQ ID NO: 23913 - protein, 15 aa, Severe acute respiratory syndrome coronavirus 2
  REGION 1..15: note = Table B: HLA-DPA1*01:03-B1*04:02L HLA-DQA1*05:05-B1*03:01L HLA-DQA1*01:03-B1*06:01L HLA-DRB1*04:08L
VSPTKLNDLCFTNVY

SEQ ID NO: 23914 - protein, 14 aa, Severe acute respiratory syndrome coronavirus 2
  REGION 1..14: note = Table B: HLA-DPA1*01:03-B1*04:02L HLA-DRB1*04:08L
DDFTGCVIAWNSNN

SEQ ID NO: 23915 - protein, 16 aa, Severe acute respiratory syndrome coronavirus 2
  REGION 1..16: note = Table B: HLA-DPA1*01:03-B1*04:02L HLA-DPA1*02:01-B1*13:01L
NYNYLYRLFRKSNLKP

SEQ ID NO: 23916 - protein, 14 aa, Severe acute respiratory syndrome coronavirus 2
  REGION 1..14: note = Table B: HLA-DPA1*01:03-B1*04:02L HLA-DPA1*02:01-B1*13:01L
PFERDISTEIYQAG

SEQ ID NO: 23917 - protein, 13 aa, Severe acute respiratory syndrome coronavirus 2
  REGION 1..13: note = Table B: HLA-DPA1*01:03-B1*04:02L HLA-DQA1*01:03-B1*06:01L
YFPLQSYGFQPTN

SEQ ID NO: 23918 - protein, 14 aa, Severe acute respiratory syndrome coronavirus 2
  REGION 1..14: note = Table B: HLA-DPA1*01:03-B1*04:02L HLA-DQA1*01:03-B1*06:01L
PLQSYGFQPTNGVG

SEQ ID NO: 23919 - protein, 13 aa, Severe acute respiratory syndrome coronavirus 2
  REGION 1..13: note = Table B: HLA-DPA1*01:03-B1*04:02L HLA-DRB1*16:01L
RVVVLSFELLHAP

SEQ ID NO: 23920 - protein, 13 aa, Severe acute respiratory syndrome coronavirus 2
  REGION 1..13: note = Table B: HLA-DPA1*01:03-B1*04:02L HLA-DPA1*02:01-B1*13:01L HLA-DRB1*08:03L
FLPFQQFGRDIAD

SEQ ID NO: 23921 - protein, 13 aa, Severe acute respiratory syndrome coronavirus 2
  REGION 1..13: note = Table B: HLA-DPA1*01:03-B1*04:02L
SFGGVSVITPGTN

SEQ ID NO: 23922 - protein, 16 aa, Severe acute respiratory syndrome coronavirus 2
  REGION 1..16: note = Table B: HLA-DPA1*01:03-B1*04:02L
VFQTRAGCLIGAEHVN

SEQ ID NO: 23923 - protein, 13 aa, Severe acute respiratory syndrome coronavirus 2
  REGION 1..13: note = Table B: HLA-DPA1*01:03-B1*04:02L HLA-DRB1*04:08L
DIPIGAGICASYQ

SEQ ID NO: 23924 - protein, 16 aa, Severe acute respiratory syndrome coronavirus 2
  REGION 1..16: note = Table B: HLA-DPA1*01:03-B1*04:02L
SQSIIAYTMSLGAENS

SEQ ID NO: 23925 - protein, 13 aa, Severe acute respiratory syndrome coronavirus 2
  REGION 1..13: note = Table B: HLA-DPA1*01:03-B1*04:02L
NLLLQYGSFCTQL

SEQ ID NO: 23926 - protein, 12 aa, Severe acute respiratory syndrome coronavirus 2
  REGION 1..12: note = Table B: HLA-DPA1*01:03-B1*04:02L
QYTSALLAGTIT

SEQ ID NO: 23927 - protein, 13 aa, Severe acute respiratory syndrome coronavirus 2
  REGION 1..13: note = Table B: HLA-DPA1*01:03-B1*04:02L
TASALGKLQDVVN

SEQ ID NO: 23928 - protein, 16 aa, Severe acute respiratory syndrome coronavirus 2
  REGION 1..16: note = Table B: HLA-DPA1*01:03-B1*04:02L
LGKLQDVVNQNAQALN

SEQ ID NO: 23929 - protein, 13 aa, Severe acute respiratory syndrome coronavirus 2
  REGION 1..13: note = Table B: HLA-DPA1*01:03-B1*04:02L HLA-DPA1*01:03-B1*104:01L
DVVNQNAQALNTL

SEQ ID NO: 23930 - protein, 16 aa, Severe acute respiratory syndrome coronavirus 2
  REGION 1..16: note = Table B: HLA-DPA1*01:03-B1*04:02L HLA-DPA1*01:03-B1*104:01L
VKQLSSNFGAISSVLN

SEQ ID NO: 23931 - protein, 14 aa, Severe acute respiratory syndrome coronavirus 2
  REGION 1..14: note = Table B: HLA-DPA1*01:03-B1*04:02L
SNFGAISSVLNDIL

SEQ ID NO: 23932 - protein, 14 aa, Severe acute respiratory syndrome coronavirus 2
  REGION 1..14: note = Table B: HLA-DPA1*01:03-B1*04:02L HLA-DQA1*05:05-B1*03:01L
FVTQRNFYEPQIIT

SEQ ID NO: 23933 - protein, 15 aa, Severe acute respiratory syndrome coronavirus 2
  REGION 1..15: note = Table B: HLA-DPA1*01:03-B1*04:02L HLA-DPA1*03:01-B1*105:01L
IAIVMVTIMLCCMTS

SEQ ID NO: 23934 - protein, 14 aa, Severe acute respiratory syndrome coronavirus 2
  REGION 1..14: note = Table B: HLA-DPA1*01:03-B1*04:02L
YALVYFLQSINFVR

SEQ ID NO: 23935 - protein, 11 aa, Severe acute respiratory syndrome coronavirus 2
  REGION 1..11: note = Table B: HLA-DPA1*01:03-B1*04:02L HLA-DPA1*03:01-B1*105:01L
LYDANYFLCWH

SEQ ID NO: 23936 - protein, 15 aa, Severe acute respiratory syndrome coronavirus 2
  REGION 1..15: note = Table B: HLA-DPA1*01:03-B1*04:02L HLA-DPA1*02:01-B1*13:01L
TGVEHVTFFIYNKIV

SEQ ID NO: 23937 - protein, 18 aa, Severe acute respiratory syndrome coronavirus 2
  REGION 1..18: note = Table B: HLA-DPA1*01:03-B1*04:02L HLA-DPA1*01:03-B1*104:01L
NPVMEPIYDEPTTTTSVP

SEQ ID NO: 23938 - protein, 13 aa, Severe acute respiratory syndrome coronavirus 2
  REGION 1..13: note = Table B: HLA-DPA1*01:03-B1*04:02L
VKNLNSSRVPDLL

SEQ ID NO: 23939 - protein, 13 aa, Severe acute respiratory syndrome coronavirus 2
  REGION 1..13: note = Table B: HLA-DPA1*01:03-B1*04:02L
RINWITGGIAIAM

SEQ ID NO: 23940 - protein, 12 aa, Severe acute respiratory syndrome coronavirus 2
  REGION 1..12: note = Table B: HLA-DPA1*01:03-B1*04:02L
LMWLSYFIASFR

SEQ ID NO: 23941 - protein, 18 aa, Severe acute respiratory syndrome coronavirus 2
  REGION 1..18: note = Table B: HLA-DPA1*01:03-B1*04:02L
FRLFARTRSMWSFNPETN

SEQ ID NO: 23942 - protein, 16 aa, Severe acute respiratory syndrome coronavirus 2
  REGION 1..16: note = Table B: HLA-DPA1*01:03-B1*04:02L
RPLLESELVIGAVILR

SEQ ID NO: 23943 - protein, 14 aa, Severe acute respiratory syndrome coronavirus 2
  REGION 1..14: note = Table B: HLA-DPA1*01:03-B1*04:02L HLA-DRB1*08:02L
TLSYYKLGASQRVA

SEQ ID NO: 23944 - protein, 14 aa, Severe acute respiratory syndrome coronavirus 2
  REGION 1..14: note = Table B: HLA-DPA1*01:03-B1*04:02L HLA-DPA1*01:03-B1*104:01L HLA-DRB1*08:02L HLA-DRB1*08:03L
YYKLGASQRVAGDS

SEQ ID NO: 23945 - protein, 13 aa, Severe acute respiratory syndrome coronavirus 2
  REGION 1..13: note = Table B: HLA-DPA1*01:03-B1*04:02L HLA-DPA1*01:02-B1*04:01L
KVSIWNLDYIINL

SEQ ID NO: 23946 - protein, 15 aa, Severe acute respiratory syndrome coronavirus 2
  REGION 1..15: note = Table B: HLA-DPA1*01:03-B1*04:02L
LALITLATCELYHYQ

SEQ ID NO: 23947 - protein, 15 aa, Severe acute respiratory syndrome coronavirus 2
  REGION 1..15: note = Table B: HLA-DPA1*01:03-B1*04:02L HLA-DPA1*02:01-B1*13:01L
GTYEGNSPFHPLADN

SEQ ID NO: 23948 - protein, 16 aa, Severe acute respiratory syndrome coronavirus 2
  REGION 1..16: note = Table B: HLA-DPA1*01:03-B1*04:02L HLA-DRB3*01:01L
ARSVSPKLFIRQEEVQ

SEQ ID NO: 23949 - protein, 17 aa, Severe acute respiratory syndrome coronavirus 2
  REGION 1..17: note = Table B: HLA-DPA1*01:03-B1*04:02L
NYTVSCLPFTINCQEPK

SEQ ID NO: 23950 - protein, 15 aa, Severe acute respiratory syndrome coronavirus 2
  REGION 1..15: note = Table B: HLA-DPA1*01:03-B1*04:02L
LPFTINCQEPKLGSL

SEQ ID NO: 23951 - protein, 16 aa, Severe acute respiratory syndrome coronavirus 2
  REGION 1..16: note = Table B: HLA-DPA1*01:03-B1*04:02L HLA-DRB1*15:03L
EPKLGSLVVRCSFYED

SEQ ID NO: 23952 - protein, 14 aa, Severe acute respiratory syndrome coronavirus 2
  REGION 1..14: note = Table B: HLA-DPA1*01:03-B1*04:02L
SLVVRCSFYEDFLE

SEQ ID NO: 23953 - protein, 16 aa, Severe acute respiratory syndrome coronavirus 2
  REGION 1..16: note = Table B: HLA-DPA1*01:03-B1*04:02L
SPARMAGNGGDAALAL

SEQ ID NO: 23954 - protein, 15 aa, Severe acute respiratory syndrome coronavirus 2
  REGION 1..15: note = Table B: HLA-DPA1*01:03-B1*04:02L
PNFKDQVILLNKHID

SEQ ID NO: 23955 - protein, 16 aa, Severe acute respiratory syndrome coronavirus 2
  REGION 1..16: note = Table B: HLA-DPA1*01:03-B1*04:02L
KKQQTVTLLPAADLDD

SEQ ID NO: 23956 - protein, 17 aa, Severe acute respiratory syndrome coronavirus 2
  REGION 1..17: note = Table B: HLA-DPA1*01:03-B1*04:02L
KQQTVTLLPAADLDDFS

SEQ ID NO: 23957 - protein, 16 aa, Severe acute respiratory syndrome coronavirus 2
  REGION 1..16: note = Table B: HLA-DPA1*01:03-B1*04:02L
TVTLLPAADLDDFSKQ

SEQ ID NO: 23958 - protein, 13 aa, Severe acute respiratory syndrome coronavirus 2
  REGION 1..13: note = Table B: HLA-DPA1*01:03-B1*04:02L
AFPFTIYSLLLCR

SEQ ID NO: 23959 - protein, 13 aa, Severe acute respiratory syndrome coronavirus 2
  REGION 1..13: note = Table B: HLA-DPA1*01:03-B1*04:02L
PFTIYSLLLCRMN

SEQ ID NO: 23960 - protein, 14 aa, Severe acute respiratory syndrome coronavirus 2
  REGION 1..14: note = Table B: HLA-DRB1*12:01L HLA-DPA1*02:01-B1*13:01L HLA-DQA1*02:01-B1*03:03L HLA-DRB1*15:03L
TKRGVYCCREHEHE

SEQ ID NO: 23961 - protein, 13 aa, Severe acute respiratory syndrome coronavirus 2
  REGION 1..13: note = Table B: HLA-DRB1*12:01L
SEKSYELQTPFEI

SEQ ID NO: 23962 - protein, 13 aa, Severe acute respiratory syndrome coronavirus 2
  REGION 1..13: note = Table B: HLA-DRB1*12:01L HLA-DPA1*02:01-B1*13:01L HLA-DPA1*01:02-B1*04:01L HLA-DRB1*16:01L
IKLAKKFDTFNGE

SEQ ID NO: 23963 - protein, 16 aa, Severe acute respiratory syndrome coronavirus 2
  REGION 1..16: note = Table B: HLA-DRB1*12:01L HLA-DPA1*03:01-B1*105:01L HLA-DRB1*15:03L
ENLTKEGATTCGYLPQ

SEQ ID NO: 23964 - protein, 14 aa, Severe acute respiratory syndrome coronavirus 2
  REGION 1..14: note = Table B: HLA-DRB1*12:01L HLA-DRB1*16:01L HLA-DRB1*04:08L HLA-DRB1*15:03L
KTILRKGGRTIAFG

SEQ ID NO: 23965 - protein, 16 aa, Severe acute respiratory syndrome coronavirus 2
  REGION 1..16: note = Table B: HLA-DRB1*12:01L
SEGLNDNLLEILQKEK

SEQ ID NO: 23966 - protein, 12 aa, Severe acute respiratory syndrome coronavirus 2
  REGION 1..12: note = Table B: HLA-DRB1*12:01L
LASFSASTSAFV

SEQ ID NO: 23967 - protein, 10 aa, Severe acute respiratory syndrome coronavirus 2
  REGION 1..10: note = Table B: HLA-DRB1*12:01L HLA-DRB1*15:03L
SLRLIDAMMF

SEQ ID NO: 23968 - protein, 11 aa, Severe acute respiratory syndrome coronavirus 2
  REGION 1..11: note = Table B: HLA-DRB1*12:01L
GGVVQLTSQWL

SEQ ID NO: 23969 - protein, 12 aa, Severe acute respiratory syndrome coronavirus 2
  REGION 1..12: note = Table B: HLA-DRB1*12:01L
LMPLKAPKEIIF

SEQ ID NO: 23970 - protein, 16 aa, Severe acute respiratory syndrome coronavirus 2
  REGION 1..16: note = Table B: HLA-DRB1*12:01L
DLDEWSMATYYLFDES

SEQ ID NO: 23971 - protein, 15 aa, Severe acute respiratory syndrome coronavirus 2
  REGION 1..15: note = Table B: HLA-DRB1*12:01L HLA-DRB1*15:03L
IKNADIVEEAKKVKP

SEQ ID NO: 23972 - protein, 13 aa, Severe acute respiratory syndrome coronavirus 2
  REGION 1..13: note = Table B: HLA-DRB1*12:01L
ATNNAMQVESDDY

SEQ ID NO: 23973 - protein, 15 aa, Severe acute respiratory syndrome coronavirus 2
  REGION 1..15: note = Table B: HLA-DRB1*12:01L HLA-DRB1*15:03L
ADPIHSLRVCVDTVR

SEQ ID NO: 23974 - protein, 15 aa, Severe acute respiratory syndrome coronavirus 2
  REGION 1..15: note = Table B: HLA-DRB1*12:01L HLA-DRB1*15:03L
DPIHSLRVCVDTVRT

SEQ ID NO: 23975 - protein, 13 aa, Severe acute respiratory syndrome coronavirus 2
  REGION 1..13: note = Table B: HLA-DRB1*12:01L
AKTVLKKCKSAFY

SEQ ID NO: 23976 - protein, 12 aa, Severe acute respiratory syndrome coronavirus 2
  REGION 1..12: note = Table B: HLA-DRB1*12:01L
ARFYFYTSKTTV

SEQ ID NO: 23977 - protein, 11 aa, Severe acute respiratory syndrome coronavirus 2
  REGION 1..11: note = Table B: HLA-DRB1*12:01L HLA-DQA1*01:03-B1*06:01L
INTLNDLNETL

SEQ ID NO: 23978 - protein, 15 aa, Severe acute respiratory syndrome coronavirus 2
  REGION 1..15: note = Table B: HLA-DRB1*12:01L HLA-DRB1*04:08L
LEEAARYMRSLKVPA

SEQ ID NO: 23979 - protein, 13 aa, Severe acute respiratory syndrome coronavirus 2
  REGION 1..13: note = Table B: HLA-DRB1*12:01L
LLSLREVRTIKVF

SEQ ID NO: 23980 - protein, 11 aa, Severe acute respiratory syndrome coronavirus 2
  REGION 1..11: note = Table B: HLA-DRB1*12:01L
DTLRVEAFEYY

SEQ ID NO: 23981 - protein, 11 aa, Severe acute respiratory syndrome coronavirus 2
  REGION 1..11: note = Table B: HLA-DRB1*12:01L
PQVNGLTSIKW

SEQ ID NO: 23982 - protein, 12 aa, Severe acute respiratory syndrome coronavirus 2
  REGION 1..12: note = Table B: HLA-DRB1*12:01L
ESPFVMMSAPPA

SEQ ID NO: 23983 - protein, 15 aa, Severe acute respiratory syndrome coronavirus 2
  REGION 1..15: note = Table B: HLA-DRB1*12:01L HLA-DPA1*02:01-B1*13:01L
TYKLDGVVCTEIDPK

SEQ ID NO: 23984 - protein, 12 aa, Severe acute respiratory syndrome coronavirus 2
  REGION 1..12: note = Table B: HLA-DRB1*12:01L HLA-DRB1*12:02L HLA-DRB1*15:03L
EQPIDLVPNQPY

SEQ ID NO: 23985 - protein, 13 aa, Severe acute respiratory syndrome coronavirus 2
  REGION 1..13: note = Table B: HLA-DRB1*12:01L
FDNFKFVCDNIKF

SEQ ID NO: 23986 - protein, 12 aa, Severe acute respiratory syndrome coronavirus 2
  REGION 1..12: note = Table B: HLA-DRB1*12:01L HLA-DRB1*04:08L HLA-DQA1*02:01-B1*03:03L HLA-DRB1*15:03L
DYKHYTPSFKKG

SEQ ID NO: 23987 - protein, 12 aa, Severe acute respiratory syndrome coronavirus 2
  REGION 1..12: note = Table B: HLA-DRB1*12:01L HLA-DRB1*16:01L
IVWHVNNATNKA

SEQ ID NO: 23988 - protein, 13 aa, Severe acute respiratory syndrome coronavirus 2
  REGION 1..13: note = Table B: HLA-DRB1*12:01L HLA-DRB1*15:03L
PTTIAKNTVKSVG

SEQ ID NO: 23989 - protein, 12 aa, Severe acute respiratory syndrome coronavirus 2
  REGION 1..12: note = Table B: HLA-DRB1*12:01L HLA-DRB1*15:03L
VGKFCLEASFNY

SEQ ID NO: 23990 - protein, 11 aa, Severe acute respiratory syndrome coronavirus 2
  REGION 1..11: note = Table B: HLA-DRB1*12:01L
GYLNSTNVTIA

SEQ ID NO: 23991 - protein, 13 aa, Severe acute respiratory syndrome coronavirus 2
  REGION 1..13: note = Table B: HLA-DRB1*12:01L HLA-DPA1*01:03-B1*02:01L
AYILFTRFFYVLG

SEQ ID NO: 23992 - protein, 12 aa, Severe acute respiratory syndrome coronavirus 2
  REGION 1..12: note = Table B: HLA-DRB1*12:01L
VRMYIFFASFYY

SEQ ID NO: 23993 - protein, 12 aa, Severe acute respiratory syndrome coronavirus 2
  REGION 1..12: note = Table B: HLA-DRB1*12:01L
TTIVNGVRRSFY

SEQ ID NO: 23994 - protein, 14 aa, Severe acute respiratory syndrome coronavirus 2
  REGION 1..14: note = Table B: HLA-DRB1*12:01L HLA-DRB1*04:08L HLA-DRB1*15:03L
GKGFCKLHNWNCVN

SEQ ID NO: 23995 - protein, 16 aa, Severe acute respiratory syndrome coronavirus 2
  REGION 1..16: note = Table B: HLA-DRB1*12:01L
NTKGSLPINVIVFDGK

SEQ ID NO: 23996 - protein, 13 aa, Severe acute respiratory syndrome coronavirus 2
  REGION 1..13: note = Table B: HLA-DRB1*12:01L
DIEVTGDSCNNYM

SEQ ID NO: 23997 - protein, 13 aa, Severe acute respiratory syndrome coronavirus 2
  REGION 1..13: note = Table B: HLA-DRB1*12:01L
VNNWLKQLIKVTL

SEQ ID NO: 23998 - protein, 12 aa, Severe acute respiratory syndrome coronavirus 2
  REGION 1..12: note = Table B: HLA-DRB1*12:01L HLA-DRB1*15:03L
AVITREVGFVVP

SEQ ID NO: 23999 - protein, 12 aa, Severe acute respiratory syndrome coronavirus 2
  REGION 1..12: note = Table B: HLA-DRB1*12:01L
VGNICYTPSKLI

SEQ ID NO: 24000 - protein, 13 aa, Severe acute respiratory syndrome coronavirus 2
  REGION 1..13: note = Table B: HLA-DRB1*12:01L HLA-DRB1*15:03L
IVAIVVTCLAYYF

SEQ ID NO: 24001 - protein, 12 aa, Severe acute respiratory syndrome coronavirus 2
  REGION 1..12: note = Table B: HLA-DRB1*12:01L HLA-DPA1*03:01-B1*105:01L HLA-DRB1*15:03L
IVVTCLAYYFMR

SEQ ID NO: 24002 - protein, 13 aa, Severe acute respiratory syndrome coronavirus 2
  REGION 1..13: note = Table B: HLA-DRB1*12:01L HLA-DPA1*02:01-B1*13:01L HLA-DRB1*04:08L HLA-DRB1*15:03L
RFRRAFGEYSHVV

SEQ ID NO: 24003 - protein, 12 aa, Severe acute respiratory syndrome coronavirus 2
  REGION 1..12: note = Table B: HLA-DRB1*12:01L
PVYSFLPGVYSV

SEQ ID NO: 24004 - protein, 13 aa, Severe acute respiratory syndrome coronavirus 2
  REGION 1..13: note = Table B: HLA-DRB1*12:01L
IQWMVMFTPLVPF

SEQ ID NO: 24005 - protein, 12 aa, Severe acute respiratory syndrome coronavirus 2
  REGION 1..12: note = Table B: HLA-DRB1*12:01L HLA-DQA1*05:05-B1*03:01L
VMFTPLVPFWIT

SEQ ID NO: 24006 - protein, 11 aa, Severe acute respiratory syndrome coronavirus 2
  REGION 1..11: note = Table B: HLA-DRB1*12:01L HLA-DQA1*01:03-B1*06:01L
YWFFSNYLKRR

SEQ ID NO: 24007 - protein, 13 aa, Severe acute respiratory syndrome coronavirus 2
  REGION 1..13: note = Table B: HLA-DRB1*12:01L HLA-DRB1*15:03L
YEDLLIRKSNHNF

SEQ ID NO: 24008 - protein, 13 aa, Severe acute respiratory syndrome coronavirus 2
  REGION 1..13: note = Table B: HLA-DRB1*12:01L HLA-DRB1*04:08L
NFYGPFVDRQTAQ

SEQ ID NO: 24009 - protein, 13 aa, Severe acute respiratory syndrome coronavirus 2
  REGION 1..13: note = Table B: HLA-DRB1*12:01L
VKRTIKGTHHWLL

SEQ ID NO: 24010 - protein, 14 aa, Severe acute respiratory syndrome coronavirus 2
  REGION 1..14: note = Table B: HLA-DRB1*12:01L
ATVAYFNMVYMPAS

SEQ ID NO: 24011 - protein, 13 aa, Severe acute respiratory syndrome coronavirus 2
  REGION 1..13: note = Table B: HLA-DRB1*12:01L
YFNMVYMPASWVM

SEQ ID NO: 24012 - protein, 12 aa, Severe acute respiratory syndrome coronavirus 2
  REGION 1..12: note = Table B: HLA-DRB1*12:01L HLA-DPA1*02:01-B1*13:01L
GARRVWTLMNVL

SEQ ID NO: 24013 - protein, 12 aa, Severe acute respiratory syndrome coronavirus 2
  REGION 1..12: note = Table B: HLA-DRB1*12:01L HLA-DPA1*03:01-B1*105:01L
YCPIFFITGNTL

SEQ ID NO: 24014 - protein, 13 aa, Severe acute respiratory syndrome coronavirus 2
  REGION 1..13: note = Table B: HLA-DRB1*12:01L
LNRYFRLTLGVYD

SEQ ID NO: 24015 - protein, 10 aa, Severe acute respiratory syndrome coronavirus 2
  REGION 1..10: note = Table B: HLA-DRB1*12:01L HLA-DRB1*16:01L HLA-DQA1*02:01-B1*03:03L
EFRYMNSQGL

SEQ ID NO: 24016 - protein, 14 aa, Severe acute respiratory syndrome coronavirus 2
  REGION 1..14: note = Table B: HLA-DRB1*12:01L HLA-DPA1*02:01-B1*13:01L
GGKPCIKVATVQSK

SEQ ID NO: 24017 - protein, 12 aa, Severe acute respiratory syndrome coronavirus 2
  REGION 1..12: note = Table B: HLA-DRB1*12:01L
TSVVLLSVLQQL

SEQ ID NO: 24018 - protein, 10 aa, Severe acute respiratory syndrome coronavirus 2
  REGION 1..10: note = Table B: HLA-DRB1*12:01L HLA-DRB1*15:03L
LSVLQQLRVE

SEQ ID NO: 24019 - protein, 11 aa, Severe acute respiratory syndrome coronavirus 2
  REGION 1..11: note = Table B: HLA-DRB1*12:01L HLA-DRB1*10:01L HLA-DRB1*04:08L
DILLAKDTTEA

SEQ ID NO: 24020 - protein, 11 aa, Severe acute respiratory syndrome coronavirus 2
  REGION 1..11: note = Table B: HLA-DRB1*12:01L HLA-DRB1*15:03L
EKMVSLLSVLL

SEQ ID NO: 24021 - protein, 13 aa, Severe acute respiratory syndrome coronavirus 2
  REGION 1..13: note = Table B: HLA-DRB1*12:01L
AVDINKLCEEMLD

SEQ ID NO: 24022 - protein, 13 aa, Severe acute respiratory syndrome coronavirus 2
  REGION 1..13: note = Table B: HLA-DRB1*12:01L HLA-DQA1*05:05-B1*03:01L
PSYAAFATAQEAY

SEQ ID NO: 24023 - protein, 13 aa, Severe acute respiratory syndrome coronavirus 2
  REGION 1..13: note = Table B: HLA-DRB1*12:01L HLA-DPA1*02:01-B1*13:01L HLA-DRB1*15:03L
MQRKLEKMADQAM

SEQ ID NO: 24024 - protein, 16 aa, Severe acute respiratory syndrome coronavirus 2
  REGION 1..16: note = Table B: HLA-DRB1*12:01L HLA-DPA1*02:01-B1*13:01L
SSRLSFKELLVYAADP

SEQ ID NO: 24025 - protein, 14 aa, Severe acute respiratory syndrome coronavirus 2
  REGION 1..14: note = Table B: HLA-DRB1*12:01L
TSKFYGGWHNMLKT

SEQ ID NO: 24026 - protein, 12 aa, Severe acute respiratory syndrome coronavirus 2
  REGION 1..12: note = Table B: HLA-DRB1*12:01L HLA-DRB1*15:03L
PNMLRIMASLVL

SEQ ID NO: 24027 - protein, 12 aa, Severe acute respiratory syndrome coronavirus 2
  REGION 1..12: note = Table B: HLA-DRB1*12:01L HLA-DPA1*02:01-B1*13:01L
GNKIADKYVRNL

SEQ ID NO: 24028 - protein, 11 aa, Severe acute respiratory syndrome coronavirus 2
  REGION 1..11: note = Table B: HLA-DRB1*12:01L
DFVNEFYAYLR

SEQ ID NO: 24029 - protein, 15 aa, Severe acute respiratory syndrome coronavirus 2
  REGION 1..15: note = Table B: HLA-DRB1*12:01L
YAYLRKHFSMMILSD

SEQ ID NO: 24030 - protein, 11 aa, Severe acute respiratory syndrome coronavirus 2
  REGION 1..11: note = Table B: HLA-DRB1*12:01L
YLPYPDPSRIL

SEQ ID NO: 24031 - protein, 18 aa, Severe acute respiratory syndrome coronavirus 2
  REGION 1..18: note = Table B: HLA-DRB1*12:01L HLA-DPA1*01:03-B1*104:01L
LPYPDPSRILGAGCFVDD

SEQ ID NO: 24032 - protein, 12 aa, Severe acute respiratory syndrome coronavirus 2
  REGION 1..12: note = Table B: HLA-DRB1*12:01L HLA-DRB1*16:01L HLA-DRB1*15:03L
TERLKLFAAETL

SEQ ID NO: 24033 - protein, 11 aa, Severe acute respiratory syndrome coronavirus 2
  REGION 1..11: note = Table B: HLA-DRB1*12:01L
RLKLFAAETLK

SEQ ID NO: 24034 - protein, 15 aa, Severe acute respiratory syndrome coronavirus 2
  REGION 1..15: note = Table B: HLA-DRB1*12:01L HLA-DRB1*04:08L
SDRELHLSWEVGKPR

SEQ ID NO: 24035 - protein, 10 aa, Severe acute respiratory syndrome coronavirus 2
  REGION 1..10: note = Table B: HLA-DRB1*12:01L HLA-DRB1*16:01L HLA-DQA1*01:03-B1*06:01L HLA-DQA1*02:01-B1*03:03L HLA-DRB1*15:03L
VYRGTTTYKL

SEQ ID NO: 24036 - protein, 11 aa, Severe acute respiratory syndrome coronavirus 2
  REGION 1..11: note = Table B: HLA-DRB1*12:01L HLA-DRB1*15:03L
FVLTSHTVMPL

SEQ ID NO: 24037 - protein, 14 aa, Severe acute respiratory syndrome coronavirus 2
  REGION 1..14: note = Table B: HLA-DRB1*12:01L HLA-DRB1*04:08L
YVRITGLYPTLNIS

SEQ ID NO: 24038 - protein, 14 aa, Severe acute respiratory syndrome coronavirus 2
  REGION 1..14: note = Table B: HLA-DRB1*12:01L
PQIGVVREFLTRNP

SEQ ID NO: 24039 - protein, 12 aa, Severe acute respiratory syndrome coronavirus 2
  REGION 1..12: note = Table B: HLA-DRB1*12:01L HLA-DRB1*15:03L
YRRLISMMGFKM

SEQ ID NO: 24040 - protein, 12 aa, Severe acute respiratory syndrome coronavirus 2
  REGION 1..12: note = Table B: HLA-DRB1*12:01L HLA-DPA1*03:01-B1*105:01L
DRVVFVLWAHGF

SEQ ID NO: 24041 - protein, 15 aa, Severe acute respiratory syndrome coronavirus 2
  REGION 1..15: note = Table B: HLA-DRB1*12:01L
FELTSMKYFVKIGPE

SEQ ID NO: 24042 - protein, 13 aa, Severe acute respiratory syndrome coronavirus 2
  REGION 1..13: note = Table B: HLA-DRB1*12:01L HLA-DRB1*14:54L HLA-DRB1*04:08L
DVQQWGFTGNLQS

SEQ ID NO: 24043 - protein, 11 aa, Severe acute respiratory syndrome coronavirus 2
  REGION 1..11: note = Table B: HLA-DRB1*12:01L
HVASCDAIMTR

SEQ ID NO: 24044 - protein, 12 aa, Severe acute respiratory syndrome coronavirus 2
  REGION 1..12: note = Table B: HLA-DRB1*12:01L HLA-DPA1*01:02-B1*04:01L
KAYKIEELFYSY

SEQ ID NO: 24045 - protein, 11 aa, Severe acute respiratory syndrome coronavirus 2
  REGION 1..11: note = Table B: HLA-DRB1*12:01L HLA-DPA1*03:01-B1*105:01L HLA-DQA1*02:01-B1*03:03L
DAYNMMISAGF

SEQ ID NO: 24046 - protein, 13 aa, Severe acute respiratory syndrome coronavirus 2
  REGION 1..13: note = Table B: HLA-DRB1*12:01L HLA-DQA1*01:03-B1*06:01L
APAHISTIGVCSM

SEQ ID NO: 24047 - protein, 13 aa, Severe acute respiratory syndrome coronavirus 2
  REGION 1..13: note = Table B: HLA-DRB1*12:01L HLA-DRB1*15:03L
DLFRNARNGVLIT

SEQ ID NO: 24048 - protein, 12 aa, Severe acute respiratory syndrome coronavirus 2
  REGION 1..12: note = Table B: HLA-DRB1*12:01L HLA-DRB1*14:54L
SVVSKVVKVTID

SEQ ID NO: 24049 - protein, 12 aa, Severe acute respiratory syndrome coronavirus 2
  REGION 1..12: note = Table B: HLA-DRB1*12:01L
VVSKVVKVTIDY

SEQ ID NO: 24050 - protein, 13 aa, Severe acute respiratory syndrome coronavirus 2
  REGION 1..13: note = Table B: HLA-DRB1*12:01L HLA-DRB1*04:08L
LAVPYNMRVIHFG

SEQ ID NO: 24051 - protein, 14 aa, Severe acute respiratory syndrome coronavirus 2
  REGION 1..14: note = Table B: HLA-DRB1*12:01L HLA-DRB3*01:01L
ISDMYDPKTKNVTK

SEQ ID NO: 24052 - protein, 13 aa, Severe acute respiratory syndrome coronavirus 2
  REGION 1..13: note = Table B: HLA-DRB1*12:01L
SSYSLFDMSKFPL

SEQ ID NO: 24053 - protein, 13 aa, Severe acute respiratory syndrome coronavirus 2
  REGION 1..13: note = Table B: HLA-DRB1*12:01L
FPLKLRGTAVMSL

SEQ ID NO: 24054 - protein, 14 aa, Severe acute respiratory syndrome coronavirus 2
  REGION 1..14: note = Table B: HLA-DRB1*12:01L HLA-DRB1*04:08L
GQINDMILSLLSKG

SEQ ID NO: 24055 - protein, 11 aa, Severe acute respiratory syndrome coronavirus 2
  REGION 1..11: note = Table B: HLA-DRB1*12:01L
ILSLLSKGRLI

SEQ ID NO: 24056 - protein, 13 aa, Severe acute respiratory syndrome coronavirus 2
  REGION 1..13: note = Table B: HLA-DRB1*12:01L HLA-DPA1*02:01-B1*13:01L
EFQFCNDPFLGVY

SEQ ID NO: 24057 - protein, 12 aa, Severe acute respiratory syndrome coronavirus 2
  REGION 1..12: note = Table B: HLA-DRB1*12:01L HLA-DRB1*04:08L
NKSWMESEFRVY

SEQ ID NO: 24058 - protein, 11 aa, Severe acute respiratory syndrome coronavirus 2
  REGION 1..11: note = Table B: HLA-DRB1*12:01L HLA-DRB1*15:03L
GNFKNLREFVF

SEQ ID NO: 24059 - protein, 10 aa, Severe acute respiratory syndrome coronavirus 2
  REGION 1..10: note = Table B: HLA-DRB1*12:01L HLA-DRB1*15:03L
FKNLREFVFK

SEQ ID NO: 24060 - protein, 10 aa, Severe acute respiratory syndrome coronavirus 2
  REGION 1..10: note = Table B: HLA-DRB1*12:01L HLA-DQA1*03:01-B1*03:02L HLA-DPA1*01:02-B1*04:01L HLA-DRB1*16:01L
RFQTLLALHR

SEQ ID NO: 24061 - protein, 13 aa, Severe acute respiratory syndrome coronavirus 2
  REGION 1..13: note = Table B: HLA-DRB1*12:01L HLA-DRB1*16:01L
VEKGIYQTSNFRV

SEQ ID NO: 24062 - protein, 10 aa, Severe acute respiratory syndrome coronavirus 2
  REGION 1..10: note = Table B: HLA-DRB1*12:01L HLA-DQA1*03:01-B1*03:02L
RFASVYAWNR

SEQ ID NO: 24063 - protein, 14 aa, Severe acute respiratory syndrome coronavirus 2
  REGION 1..14: note = Table B: HLA-DRB1*12:01L HLA-DRB3*01:01L HLA-DPA1*02:01-B1*13:01L HLA-DPA1*01:02-B1*04:01L
RKSNLKPFERDIST

SEQ ID NO: 24064 - protein, 13 aa, Severe acute respiratory syndrome coronavirus 2
  REGION 1..13: note = Table B: HLA-DRB1*12:01L
FNCYFPLQSYGFQ

SEQ ID NO: 24065 - protein, 13 aa, Severe acute respiratory syndrome coronavirus 2
  REGION 1..13: note = Table B: HLA-DRB1*12:01L
TLEILDITPCSFG

SEQ ID NO: 24066 - protein, 12 aa, Severe acute respiratory syndrome coronavirus 2
  REGION 1..12: note = Table B: HLA-DRB1*12:01L
GAALQIPFAMQM

SEQ ID NO: 24067 - protein, 12 aa, Severe acute respiratory syndrome coronavirus 2
  REGION 1..12: note = Table B: HLA-DRB1*12:01L HLA-DRB1*15:03L
LITGRLQSLQTY

SEQ ID NO: 24068 - protein, 13 aa, Severe acute respiratory syndrome coronavirus 2
  REGION 1..13: note = Table B: HLA-DRB1*12:01L HLA-DRB1*15:03L
ELGKYEQYIKWPW

SEQ ID NO: 24069 - protein, 13 aa, Severe acute respiratory syndrome coronavirus 2
  REGION 1..13: note = Table B: HLA-DRB1*12:01L HLA-DRB1*15:03L
IAGLIAIVMVTIM

SEQ ID NO: 24070 - protein, 10 aa, Severe acute respiratory syndrome coronavirus 2
  REGION 1..10: note = Table B: HLA-DRB1*12:01L HLA-DPA1*03:01-B1*105:01L HLA-DRB1*15:03L
FVTVYSHLLL

SEQ ID NO: 24071 - protein, 12 aa, Severe acute respiratory syndrome coronavirus 2
  REGION 1..12: note = Table B: HLA-DRB1*12:01L
LVAAGLEAPFLY

SEQ ID NO: 24072 - protein, 10 aa, Severe acute respiratory syndrome coronavirus 2
  REGION 1..10: note = Table B: HLA-DRB1*12:01L HLA-DQA1*03:01-B1*03:02L HLA-DPA1*01:02-B1*04:01L HLA-DQA1*02:01-B1*03:03L
YFLQSINFVR

SEQ ID NO: 24073 - protein, 12 aa, Severe acute respiratory syndrome coronavirus 2
  REGION 1..12: note = Table B: HLA-DRB1*12:01L
IPYNSVTSSIVI

SEQ ID NO: 24074 - protein, 12 aa, Severe acute respiratory syndrome coronavirus 2
  REGION 1..12: note = Table B: HLA-DRB1*12:01L
LHSYFTSDYYQL

SEQ ID NO: 24075 - protein, 14 aa, Severe acute respiratory syndrome coronavirus 2
  REGION 1..14: note = Table B: HLA-DRB1*12:01L HLA-DRB1*15:03L
ARTRSMWSFNPETN

SEQ ID NO: 24076 - protein, 14 aa, Severe acute respiratory syndrome coronavirus 2
  REGION 1..14: note = Table B: HLA-DRB1*12:01L HLA-DRB1*15:03L
VIGAVILRGHLRIA

SEQ ID NO: 24077 - protein, 12 aa, Severe acute respiratory syndrome coronavirus 2
  REGION 1..12: note = Table B: HLA-DRB1*12:01L
MRTFKVSIWNLD

SEQ ID NO: 24078 - protein, 11 aa, Severe acute respiratory syndrome coronavirus 2
  REGION 1..11: note = Table B: HLA-DRB1*12:01L
NLIIKNLSKSL

SEQ ID NO: 24079 - protein, 12 aa, Severe acute respiratory syndrome coronavirus 2
  REGION 1..12: note = Table B: HLA-DRB1*12:01L
SKSLTENKYSQL

SEQ ID NO: 24080 - protein, 11 aa, Severe acute respiratory syndrome coronavirus 2
  REGION 1..11: note = Table B: HLA-DRB1*12:01L HLA-DPA1*03:01-B1*105:01L HLA-DQA1*01:03-B1*06:01L HLA-DRB1*15:03L
ITLATCELYHY

SEQ ID NO: 24081 - protein, 12 aa, Severe acute respiratory syndrome coronavirus 2
  REGION 1..12: note = Table B: HLA-DRB1*12:01L HLA-DRB1*15:03L
SPIFLIVAAIVF

SEQ ID NO: 24082 - protein, 12 aa, Severe acute respiratory syndrome coronavirus 2
  REGION 1..12: note = Table B: HLA-DRB1*12:01L HLA-DPA1*02:01-B1*13:01L
VGARKSAPLIEL

SEQ ID NO: 24083 - protein, 11 aa, Severe acute respiratory syndrome coronavirus 2
  REGION 1..11: note = Table B: HLA-DRB1*12:01L
DFLEYHDVRVV

SEQ ID NO: 24084 - protein, 10 aa, Severe acute respiratory syndrome coronavirus 2
  REGION 1..10: note = Table B: HLA-DRB1*12:01L
MSDNGPQNQR

SEQ ID NO: 24085 - protein, 14 aa, Severe acute respiratory syndrome coronavirus 2
  REGION 1..14: note = Table B: HLA-DRB1*12:01L
GTGPEAGLPYGANK

SEQ ID NO: 24086 - protein, 13 aa, Severe acute respiratory syndrome coronavirus 2
  REGION 1..13: note = Table B: HLA-DRB1*12:01L
AGLPYGANKDGII

SEQ ID NO: 24087 - protein, 14 aa, Severe acute respiratory syndrome coronavirus 2
  REGION 1..14: note = Table B: HLA-DRB1*12:01L
ASSRSSSRSRNSSR

SEQ ID NO: 24088 - protein, 12 aa, Severe acute respiratory syndrome coronavirus 2
  REGION 1..12: note = Table B: HLA-DRB1*12:01L HLA-DPA1*02:01-B1*13:01L
QKRTATKAYNVT

SEQ ID NO: 24089 - protein, 18 aa, Severe acute respiratory syndrome coronavirus 2
  REGION 1..18: note = Table B: HLA-DRB1*12:01L HLA-DPA1*01:03-B1*104:01L HLA-DRB1*15:03L
LPQRQKKQQTVTLLPAAD

SEQ ID NO: 24090 - protein, 12 aa, Severe acute respiratory syndrome coronavirus 2
  REGION 1..12: note = Table B: HLA-DRB1*12:02L HLA-DRB3*01:01L HLA-DRB1*14:54L
NGNLHPDSATLV

SEQ ID NO: 24091 - protein, 18 aa, Severe acute respiratory syndrome coronavirus 2
  REGION 1..18: note = Table B: HLA-DRB1*12:02L HLA-DRB1*07:01L HLA-DRB1*15:01L
LPINVIVFDGKSKCEESS

SEQ ID NO: 24092 - protein, 13 aa, Severe acute respiratory syndrome coronavirus 2
  REGION 1..13: note = Table B: HLA-DRB1*12:02L HLA-DRB3*01:01L
MLTYNKVENMTPR

SEQ ID NO: 24093 - protein, 12 aa, Severe acute respiratory syndrome coronavirus 2
  REGION 1..12: note = Table B: HLA-DRB1*12:02L
HNFLVQAGNVQL

SEQ ID NO: 24094 - protein, 13 aa, Severe acute respiratory syndrome coronavirus 2
  REGION 1..13: note = Table B: HLA-DRB1*12:02L
FVDRQTAQAAGTD

SEQ ID NO: 24095 - protein, 12 aa, Severe acute respiratory syndrome coronavirus 2
  REGION 1..12: note = Table B: HLA-DRB1*12:02L
FDIYNDKVAGFA

SEQ ID NO: 24096 - protein, 12 aa, Severe acute respiratory syndrome coronavirus 2
  REGION 1..12: note = Table B: HLA-DRB1*12:02L
NQVIVNNLDKSA

SEQ ID NO: 24097 - protein, 12 aa, Severe acute respiratory syndrome coronavirus 2
  REGION 1..12: note = Table B: HLA-DRB1*12:02L HLA-DRB1*14:54L HLA-DRB1*04:08L
LKSIAATRGATV

SEQ ID NO: 24098 - protein, 12 aa, Severe acute respiratory syndrome coronavirus 2
  REGION 1..12: note = Table B: HLA-DRB1*12:02L
ATVVIGTSKFYG

SEQ ID NO: 24099 - protein, 11 aa, Severe acute respiratory syndrome coronavirus 2
  REGION 1..11: note = Table B: HLA-DRB1*12:02L HLA-DRB1*14:54L
RVYSTGSNVFQ

SEQ ID NO: 24100 - protein, 15 aa, Severe acute respiratory syndrome coronavirus 2
  REGION 1..15: note = Table B: HLA-DRB3*01:01L HLA-DRB1*07:01L HLA-DRB1*08:02L
VAELEGIQYGRSGET

SEQ ID NO: 24101 - protein, 15 aa, Severe acute respiratory syndrome coronavirus 2
  REGION 1..15: note = Table B: HLA-DRB3*01:01L
HSYGADLKSFDLGDE

SEQ ID NO: 24102 - protein, 13 aa, Severe acute respiratory syndrome coronavirus 2
  REGION 1..13: note = Table B: HLA-DRB3*01:01L
HEIAWYTERSEKS

SEQ ID NO: 24103 - protein, 15 aa, Severe acute respiratory syndrome coronavirus 2
  REGION 1..15: note = Table B: HLA-DRB3*01:01L
PFEIKLAKKFDTFNG

SEQ ID NO: 24104 - protein, 13 aa, Severe acute respiratory syndrome coronavirus 2
  REGION 1..13: note = Table B: HLA-DRB3*01:01L
TSAFVETVKGLDY

SEQ ID NO: 24105 - protein, 14 aa, Severe acute respiratory syndrome coronavirus 2
  REGION 1..14: note = Table B: HLA-DRB3*01:01L HLA-DPA1*02:01-B1*13:01L
VETVKGLDYKAFKQ

SEQ ID NO: 24106 - protein, 13 aa, Severe acute respiratory syndrome coronavirus 2
  REGION 1..13: note = Table B: HLA-DRB3*01:01L
NITFELDERIDKV

SEQ ID NO: 24107 - protein, 13 aa, Severe acute respiratory syndrome coronavirus 2
  REGION 1..13: note = Table B: HLA-DRB3*01:01L
ITFELDERIDKVL

SEQ ID NO: 24108 - protein, 14 aa, Severe acute respiratory syndrome coronavirus 2
  REGION 1..14: note = Table B: HLA-DRB3*01:01L
KGEDIQLLKSAYEN

SEQ ID NO: 24109 - protein, 15 aa, Severe acute respiratory syndrome coronavirus 2
  REGION 1..15: note = Table B: HLA-DRB3*01:01L HLA-DRB1*08:02L
GEDIQLLKSAYENFN

SEQ ID NO: 24110 - protein, 16 aa, Severe acute respiratory syndrome coronavirus 2
  REGION 1..16: note = Table B: HLA-DRB3*01:01L HLA-DRB1*07:01L HLA-DRB1*10:01L
DIQLLKSAYENFNQHE

SEQ ID NO: 24111 - protein, 16 aa, Severe acute respiratory syndrome coronavirus 2
  REGION 1..16: note = Table B: HLA-DRB3*01:01L
DKNLYDKLVSSFLEMK

SEQ ID NO: 24112 - protein, 16 aa, Severe acute respiratory syndrome coronavirus 2
  REGION 1..16: note = Table B: HLA-DRB3*01:01L HLA-DRB1*15:03L
SKPSVEQRKQDDKKIK

SEQ ID NO: 24113 - protein, 12 aa, Severe acute respiratory syndrome coronavirus 2
  REGION 1..12: note = Table B: HLA-DRB3*01:01L HLA-DRB1*04:08L
TKAIVSTIQRKY

SEQ ID NO: 24114 - protein, 12 aa, Severe acute respiratory syndrome coronavirus 2
  REGION 1..12: note = Table B: HLA-DRB3*01:01L
KAIVSTIQRKYK

SEQ ID NO: 24115 - protein, 12 aa, Severe acute respiratory syndrome coronavirus 2
  REGION 1..12: note = Table B: HLA-DRB3*01:01L
AIVSTIQRKYKG

SEQ ID NO: 24116 - protein, 12 aa, Severe acute respiratory syndrome coronavirus 2
  REGION 1..12: note = Table B: HLA-DRB3*01:01L HLA-DPA1*02:01-B1*13:01L HLA-DRB1*08:03L
ARYMRSLKVPAT

SEQ ID NO: 24117 - protein, 14 aa, Severe acute respiratory syndrome coronavirus 2
  REGION 1..14: note = Table B: HLA-DRB3*01:01L
LGIEFLKRGDKSVY

SEQ ID NO: 24118 - protein, 14 aa, Severe acute respiratory syndrome coronavirus 2
  REGION 1..14: note = Table B: HLA-DRB3*01:01L HLA-DPA1*02:01-B1*13:01L HLA-DPA1*03:01-B1*105:01L HLA-DQA1*01:03-B1*06:01L
FDNLKTLLSLREVR

SEQ ID NO: 24119 - protein, 13 aa, Severe acute respiratory syndrome coronavirus 2
  REGION 1..13: note = Table B: HLA-DRB3*01:01L
FEYYHTTDPSFLG

SEQ ID NO: 24120 - protein, 16 aa, Severe acute respiratory syndrome coronavirus 2
  REGION 1..16: note = Table B: HLA-DRB3*01:01L
VEAVMYMGTLSYEQFK

SEQ ID NO: 24121 - protein, 16 aa, Severe acute respiratory syndrome coronavirus 2
  REGION 1..16: note = Table B: HLA-DRB3*01:01L HLA-DRB1*14:54L
IDGALLTKSSEYKGPI

SEQ ID NO: 24122 - protein, 13 aa, Severe acute respiratory syndrome coronavirus 2
  REGION 1..13: note = Table B: HLA-DRB3*01:01L
NSYTTTIKPVTYK

SEQ ID NO: 24123 - protein, 14 aa, Severe acute respiratory syndrome coronavirus 2
  REGION 1..14: note = Table B: HLA-DRB3*01:01L HLA-DQA1*05:05-B1*03:01L HLA-DRB1*07:01L
DDLNQLTGYKKPAS

SEQ ID NO: 24124 - protein, 14 aa, Severe acute respiratory syndrome coronavirus 2
  REGION 1..14: note = Table B: HLA-DRB3*01:01L HLA-DPA1*01:03-B1*02:01L HLA-DPA1*01:03-B1*104:01L HLA-DRB1*08:02L
VVGDIILKPANNSL

SEQ ID NO: 24125 - protein, 14 aa, Severe acute respiratory syndrome coronavirus 2
  REGION 1..14: note = Table B: HLA-DRB3*01:01L
KAGQKTYERHSLSH

SEQ ID NO: 24126 - protein, 15 aa, Severe acute respiratory syndrome coronavirus 2
  REGION 1..15: note = Table B: HLA-DRB3*01:01L
ERHSLSHFVNLDNLR

SEQ ID NO: 24127 - protein, 16 aa, Severe acute respiratory syndrome coronavirus 2
  REGION 1..16: note = Table B: HLA-DRB3*01:01L
DSAEVAVKMFDAYVNT

SEQ ID NO: 24128 - protein, 15 aa, Severe acute respiratory syndrome coronavirus 2
  REGION 1..15: note = Table B: HLA-DRB3*01:01L HLA-DRB1*04:08L
AKNVSLDNVLSTFIS

SEQ ID NO: 24129 - protein, 14 aa, Severe acute respiratory syndrome coronavirus 2
  REGION 1..14: note = Table B: HLA-DRB3*01:01L
TKDVVECLKLSHQS

SEQ ID NO: 24130 - protein, 14 aa, Severe acute respiratory syndrome coronavirus 2
  REGION 1..14: note = Table B: HLA-DRB3*01:01L
TYNKVENMTPRDLG

SEQ ID NO: 24131 - protein, 13 aa, Severe acute respiratory syndrome coronavirus 2
  REGION 1..13: note = Table B: HLA-DRB3*01:01L
KDFMSLSEQLRKQ

SEQ ID NO: 24132 - protein, 14 aa, Severe acute respiratory syndrome coronavirus 2
  REGION 1..14: note = Table B: HLA-DRB3*01:01L
DFMSLSEQLRKQIR

SEQ ID NO: 24133 - protein, 14 aa, Severe acute respiratory syndrome coronavirus 2
  REGION 1..14: note = Table B: HLA-DRB3*01:01L HLA-DRB1*15:01L
RVVTTFDSEYCRHG

SEQ ID NO: 24134 - protein, 14 aa, Severe acute respiratory syndrome coronavirus 2
  REGION 1..14: note = Table B: HLA-DRB3*01:01L HLA-DPA1*02:01-B1*13:01L
VVTTFDSEYCRHGT

SEQ ID NO: 24135 - protein, 13 aa, Severe acute respiratory syndrome coronavirus 2
  REGION 1..13: note = Table B: HLA-DRB3*01:01L
DVLLPLTQYNRYL

SEQ ID NO: 24136 - protein, 13 aa, Severe acute respiratory syndrome coronavirus 2
  REGION 1..13: note = Table B: HLA-DRB3*01:01L
YNRYLALYNKYKY

SEQ ID NO: 24137 - protein, 13 aa, Severe acute respiratory syndrome coronavirus 2
  REGION 1..13: note = Table B: HLA-DRB3*01:01L
NRYLALYNKYKYF

SEQ ID NO: 24138 - protein, 14 aa, Severe acute respiratory syndrome coronavirus 2
  REGION 1..14: note = Table B: HLA-DRB3*01:01L HLA-DRB1*15:03L
TFQSAVKRTIKGTH

SEQ ID NO: 24139 - protein, 12 aa, Severe acute respiratory syndrome coronavirus 2
  REGION 1..12: note = Table B: HLA-DRB3*01:01L HLA-DRB1*04:08L
ARTVYDDGARRV

SEQ ID NO: 24140 - protein, 13 aa, Severe acute respiratory syndrome coronavirus 2
  REGION 1..13: note = Table B: HLA-DRB3*01:01L HLA-DRB1*04:08L
RTVYDDGARRVWT

SEQ ID NO: 24141 - protein, 14 aa, Severe acute respiratory syndrome coronavirus 2
  REGION 1..14: note = Table B: HLA-DRB3*01:01L HLA-DPA1*01:03-B1*02:01L
LDNRATLQAIASEF

SEQ ID NO: 24142 - protein, 14 aa, Severe acute respiratory syndrome coronavirus 2
  REGION 1..14: note = Table B: HLA-DRB3*01:01L HLA-DRB1*07:01L HLA-DRB1*08:02L
SEFSSLPSYAAFAT

SEQ ID NO: 24143 - protein, 14 aa, Severe acute respiratory syndrome coronavirus 2
  REGION 1..14: note = Table B: HLA-DRB3*01:01L HLA-DRB1*15:03L
NGDSEVVLKKLKKS

SEQ ID NO: 24144 - protein, 14 aa, Severe acute respiratory syndrome coronavirus 2
  REGION 1..14: note = Table B: HLA-DRB3*01:01L
PLIVTALRANSAVK

SEQ ID NO: 24145 - protein, 14 aa, Severe acute respiratory syndrome coronavirus 2
  REGION 1..14: note = Table B: HLA-DRB3*01:01L HLA-DPA1*02:01-B1*13:01L
IVTALRANSAVKLQ

SEQ ID NO: 24146 - protein, 13 aa, Severe acute respiratory syndrome coronavirus 2
  REGION 1..13: note = Table B: HLA-DRB3*01:01L
YFVVKRHTFSNYQ

SEQ ID NO: 24147 - protein, 14 aa, Severe acute respiratory syndrome coronavirus 2
  REGION 1..14: note = Table B: HLA-DRB3*01:01L
FVVKRHTFSNYQHE

SEQ ID NO: 24148 - protein, 14 aa, Severe acute respiratory syndrome coronavirus 2
  REGION 1..14: note = Table B: HLA-DRB3*01:01L
EERLKLFDRYFKYW

SEQ ID NO: 24149 - protein, 16 aa, Severe acute respiratory syndrome coronavirus 2
  REGION 1..16: note = Table B: HLA-DRB3*01:01L
NAAISDYDYYRYNLPT

SEQ ID NO: 24150 - protein, 15 aa, Severe acute respiratory syndrome coronavirus 2
  REGION 1..15: note = Table B: HLA-DRB3*01:01L
ITQMNLKYAISAKNR

SEQ ID NO: 24151 - protein, 14 aa, Severe acute respiratory syndrome coronavirus 2
  REGION 1..14: note = Table B: HLA-DRB3*01:01L
RIMASLVLARKHTT

SEQ ID NO: 24152 - protein, 15 aa, Severe acute respiratory syndrome coronavirus 2
  REGION 1..15: note = Table B: HLA-DRB3*01:01L
ATTAYANSVFNICQA

SEQ ID NO: 24153 - protein, 14 aa, Severe acute respiratory syndrome coronavirus 2
  REGION 1..14: note = Table B: HLA-DRB3*01:01L HLA-DPA1*02:01-B1*13:01L
SQGLVASIKNFKSV

SEQ ID NO: 24154 - protein, 14 aa, Severe acute respiratory syndrome coronavirus 2
  REGION 1..14: note = Table B: HLA-DRB3*01:01L
DAYPLTKHPNQEYA

SEQ ID NO: 24155 - protein, 14 aa, Severe acute respiratory syndrome coronavirus 2
  REGION 1..14: note = Table B: HLA-DRB3*01:01L
VMLTNDNTSRYWEP

SEQ ID NO: 24156 - protein, 14 aa, Severe acute respiratory syndrome coronavirus 2
  REGION 1..14: note = Table B: HLA-DRB3*01:01L HLA-DRB1*08:02L
RIVYTACSHAAVDA

SEQ ID NO: 24157 - protein, 14 aa, Severe acute respiratory syndrome coronavirus 2
  REGION 1..14: note = Table B: HLA-DRB3*01:01L
NYDLSVVNARLRAK

SEQ ID NO: 24158 - protein, 16 aa, Severe acute respiratory syndrome coronavirus 2
  REGION 1..16: note = Table B: HLA-DRB3*01:01L HLA-DPA1*02:01-B1*13:01L
DNKLKAHKDKSAQCFK

SEQ ID NO: 24159 - protein, 13 aa, Severe acute respiratory syndrome coronavirus 2
  REGION 1..13: note = Table B: HLA-DRB3*01:01L
VREFLTRNPAWRK

SEQ ID NO: 24160 - protein, 13 aa, Severe acute respiratory syndrome coronavirus 2
  REGION 1..13: note = Table B: HLA-DRB3*01:01L
KLQFTSLEIPRRN

SEQ ID NO: 24161 - protein, 14 aa, Severe acute respiratory syndrome coronavirus 2
  REGION 1..14: note = Table B: HLA-DRB3*01:01L
LQFTSLEIPRRNVA

SEQ ID NO: 24162 - protein, 14 aa, Severe acute respiratory syndrome coronavirus 2
  REGION 1..14: note = Table B: HLA-DRB3*01:01L
RRNVATLQAENVTG

SEQ ID NO: 24163 - protein, 14 aa, Severe acute respiratory syndrome coronavirus 2
  REGION 1..14: note = Table B: HLA-DRB3*01:01L HLA-DPA1*01:02-B1*04:01L
AKRNIKPVPEVKIL

SEQ ID NO: 24164 - protein, 14 aa, Severe acute respiratory syndrome coronavirus 2
  REGION 1..14: note = Table B: HLA-DRB3*01:01L
VDIAANTVIWDYKR

SEQ ID NO: 24165 - protein, 16 aa, Severe acute respiratory syndrome coronavirus 2
  REGION 1..16: note = Table B: HLA-DRB3*01:01L
VDGVVQQLPETYFTQS

SEQ ID NO: 24166 - protein, 16 aa, Severe acute respiratory syndrome coronavirus 2
  REGION 1..16: note = Table B: HLA-DRB3*01:01L
DGVVQQLPETYFTQSR

SEQ ID NO: 24167 - protein, 15 aa, Severe acute respiratory syndrome coronavirus 2
  REGION 1..15: note = Table B: HLA-DRB3*01:01L
GGLHLLIGLAKRFKE

SEQ ID NO: 24168 - protein, 14 aa, Severe acute respiratory syndrome coronavirus 2
  REGION 1..14: note = Table B: HLA-DRB3*01:01L
DMYDPKTKNVTKEN

SEQ ID NO: 24169 - protein, 14 aa, Severe acute respiratory syndrome coronavirus 2
  REGION 1..14: note = Table B: HLA-DRB3*01:01L
FKIYSKHTPINLVR

SEQ ID NO: 24170 - protein, 15 aa, Severe acute respiratory syndrome coronavirus 2
  REGION 1..15: note = Table B: HLA-DRB3*01:01L
NGLTGTGVLTESNKK

SEQ ID NO: 24171 - protein, 14 aa, Severe acute respiratory syndrome coronavirus 2
  REGION 1..14: note = Table B: HLA-DRB3*01:01L HLA-DRB1*15:01L
NKKFLPFQQFGRDI

SEQ ID NO: 24172 - protein, 14 aa, Severe acute respiratory syndrome coronavirus 2
  REGION 1..14: note = Table B: HLA-DRB3*01:01L HLA-DRB1*15:01L
KKFLPFQQFGRDIA

SEQ ID NO: 24173 - protein, 14 aa, Severe acute respiratory syndrome coronavirus 2
  REGION 1..14: note = Table B: HLA-DRB3*01:01L
DIADTTDAVRDPQT

SEQ ID NO: 24174 - protein, 17 aa, Severe acute respiratory syndrome coronavirus 2
  REGION 1..17: note = Table B: HLA-DRB3*01:01L
DPQTLEILDITPCSFGG

SEQ ID NO: 24175 - protein, 14 aa, Severe acute respiratory syndrome coronavirus 2
  REGION 1..14: note = Table B: HLA-DRB3*01:01L
TPTWRVYSTGSNVF

SEQ ID NO: 24176 - protein, 14 aa, Severe acute respiratory syndrome coronavirus 2
  REGION 1..14: note = Table B: HLA-DRB3*01:01L
GGFNFSQILPDPSK

SEQ ID NO: 24177 - protein, 14 aa, Severe acute respiratory syndrome coronavirus 2
  REGION 1..14: note = Table B: HLA-DRB3*01:01L HLA-DRB1*07:01L
QIPFAMQMAYRFNG

SEQ ID NO: 24178 - protein, 13 aa, Severe acute respiratory syndrome coronavirus 2
  REGION 1..13: note = Table B: HLA-DRB3*01:01L HLA-DPA1*01:03-B1*104:01L HLA-DPA1*01:02-B1*04:01L HLA-DRB1*15:03L
RLDKVEAEVQIDR

SEQ ID NO: 24179 - protein, 14 aa, Severe acute respiratory syndrome coronavirus 2
  REGION 1..14: note = Table B: HLA-DRB3*01:01L
IDRLITGRLQSLQT

SEQ ID NO: 24180 - protein, 13 aa, Severe acute respiratory syndrome coronavirus 2
  REGION 1..13: note = Table B: HLA-DRB3*01:01L
HVTYVPAQEKNFT

SEQ ID NO: 24181 - protein, 15 aa, Severe acute respiratory syndrome coronavirus 2
  REGION 1..15: note = Table B: HLA-DRB3*01:01L
IVNNTVYDPLQPELD

SEQ ID NO: 24182 - protein, 13 aa, Severe acute respiratory syndrome coronavirus 2
  REGION 1..13: note = Table B: HLA-DRB3*01:01L
NTVYDPLQPELDS

SEQ ID NO: 24183 - protein, 12 aa, Severe acute respiratory syndrome coronavirus 2
  REGION 1..12: note = Table B: HLA-DRB3*01:01L
RWQLALSKGVHF

SEQ ID NO: 24184 - protein, 14 aa, Severe acute respiratory syndrome coronavirus 2
  REGION 1..14: note = Table B: HLA-DRB3*01:01L HLA-DRB1*07:01L
GDGTTSPISEHDYQ

SEQ ID NO: 24185 - protein, 13 aa, Severe acute respiratory syndrome coronavirus 2
  REGION 1..13: note = Table B: HLA-DRB3*01:01L
YVYSRVKNLNSSR

SEQ ID NO: 24186 - protein, 14 aa, Severe acute respiratory syndrome coronavirus 2
  REGION 1..14: note = Table B: HLA-DRB3*01:01L HLA-DPA1*01:03-B1*02:01L
NGTITVEELKKLLE

SEQ ID NO: 24187 - protein, 13 aa, Severe acute respiratory syndrome coronavirus 2
  REGION 1..13: note = Table B: HLA-DRB3*01:01L HLA-DRB1*04:08L
GAVILRGHLRIAG

SEQ ID NO: 24188 - protein, 14 aa, Severe acute respiratory syndrome coronavirus 2
  REGION 1..14: note = Table B: HLA-DRB3*01:01L
QRVAGDSGFAAYSR

SEQ ID NO: 24189 - protein, 16 aa, Severe acute respiratory syndrome coronavirus 2
  REGION 1..16: note = Table B: HLA-DRB3*01:01L HLA-DQA1*05:05-B1*03:01L
LSKSLTENKYSQLDEE

SEQ ID NO: 24190 - protein, 14 aa, Severe acute respiratory syndrome coronavirus 2
  REGION 1..14: note = Table B: HLA-DRB3*01:01L
VSPKLFIRQEEVQE

SEQ ID NO: 24191 - protein, 15 aa, Severe acute respiratory syndrome coronavirus 2
  REGION 1..15: note = Table B: HLA-DRB3*01:01L
PCPIHFYSKWYIRVG

SEQ ID NO: 24192 - protein, 12 aa, Severe acute respiratory syndrome coronavirus 2
  REGION 1..12: note = Table B: HLA-DRB3*01:01L HLA-DRB1*15:03L
TALTQHGKEDLK

SEQ ID NO: 24193 - protein, 16 aa, Severe acute respiratory syndrome coronavirus 2
  REGION 1..16: note = Table B: HLA-DRB3*01:01L
RRIRGGDGKMKDLSPR

SEQ ID NO: 24194 - protein, 16 aa, Severe acute respiratory syndrome coronavirus 2
  REGION 1..16: note = Table B: HLA-DRB3*01:01L
SAAEASKKPRQKRTAT

SEQ ID NO: 24195 - protein, 14 aa, Severe acute respiratory syndrome coronavirus 2
  REGION 1..14: note = Table B: HLA-DRB3*01:01L
KAYNVTQAFGRRGP

SEQ ID NO: 24196 - protein, 13 aa, Severe acute respiratory syndrome coronavirus 2
  REGION 1..13: note = Table B: HLA-DRB3*01:01L
FKDQVILLNKHID

SEQ ID NO: 24197 - protein, 16 aa, Severe acute respiratory syndrome coronavirus 2
  REGION 1..16: note = Table B: HLA-DPA1*02:01-B1*13:01L
GLVEVEKGVLPQLEQP

SEQ ID NO: 24198 - protein, 14 aa, Severe acute respiratory syndrome coronavirus 2
  REGION 1..14: note = Table B: HLA-DPA1*02:01-B1*13:01L
LEQPYVFIKRSDAR

SEQ ID NO: 24199 - protein, 14 aa, Severe acute respiratory syndrome coronavirus 2
  REGION 1..14: note = Table B: HLA-DPA1*02:01-B1*13:01L
VFIKRSDARTAPHG

SEQ ID NO: 24200 - protein, 15 aa, Severe acute respiratory syndrome coronavirus 2
  REGION 1..15: note = Table B: HLA-DPA1*02:01-B1*13:01L
FIKRSDARTAPHGHV

SEQ ID NO: 24201 - protein, 18 aa, Severe acute respiratory syndrome coronavirus 2
  REGION 1..18: note = Table B: HLA-DPA1*02:01-B1*13:01L
SDARTAPHGHVMVELVAE

SEQ ID NO: 24202 - protein, 13 aa, Severe acute respiratory syndrome coronavirus 2
  REGION 1..13: note = Table B: HLA-DPA1*02:01-B1*13:01L
GADLKSFDLGDEL

SEQ ID NO: 24203 - protein, 14 aa, Severe acute respiratory syndrome coronavirus 2
  REGION 1..14: note = Table B: HLA-DPA1*02:01-B1*13:01L
GPDGYPLECIKDLL

SEQ ID NO: 24204 - protein, 14 aa, Severe acute respiratory syndrome coronavirus 2
  REGION 1..14: note = Table B: HLA-DPA1*02:01-B1*13:01L
RAGKASCTLSEQLD

SEQ ID NO: 24205 - protein, 10 aa, Severe acute respiratory syndrome coronavirus 2
  REGION 1..10: note = Table B: HLA-DPA1*02:01-B1*13:01L HLA-DQA1*01:03-B1*06:01L HLA-DQA1*02:01-B1*03:03L
PFEIKLAKKF

SEQ ID NO: 24206 - protein, 14 aa, Severe acute respiratory syndrome coronavirus 2
  REGION 1..14: note = Table B: HLA-DPA1*02:01-B1*13:01L
VVGEGSEGLNDNLL

SEQ ID NO: 24207 - protein, 15 aa, Severe acute respiratory syndrome coronavirus 2
  REGION 1..15: note = Table B: HLA-DPA1*02:01-B1*13:01L
GDFKLNEEIAIILAS

SEQ ID NO: 24208 - protein, 14 aa, Severe acute respiratory syndrome coronavirus 2
  REGION 1..14: note = Table B: HLA-DPA1*02:01-B1*13:01L
ASTSAFVETVKGLD

SEQ ID NO: 24209 - protein, 14 aa, Severe acute respiratory syndrome coronavirus 2
  REGION 1..14: note = Table B: HLA-DPA1*02:01-B1*13:01L HLA-DPA1*01:03-B1*104:01L
LQKAAITILDGISQ

SEQ ID NO: 24210 - protein, 15 aa, Severe acute respiratory syndrome coronavirus 2
  REGION 1..15: note = Table B: HLA-DPA1*02:01-B1*13:01L HLA-DPA1*01:03-B1*104:01L
YSLRLIDAMMFTSDL

SEQ ID NO: 24211 - protein, 11 aa, Severe acute respiratory syndrome coronavirus 2
  REGION 1..11: note = Table B: HLA-DPA1*02:01-B1*13:01L
KLKALNLGETF

SEQ ID NO: 24212 - protein, 14 aa, Severe acute respiratory syndrome coronavirus 2
  REGION 1..14: note = Table B: HLA-DPA1*02:01-B1*13:01L
VKSREETGLLMPLK

SEQ ID NO: 24213 - protein, 14 aa, Severe acute respiratory syndrome coronavirus 2
  REGION 1..14: note = Table B: HLA-DPA1*02:01-B1*13:01L HLA-DRB1*15:03L
VTNNTFTLKGGAPT

SEQ ID NO: 24214 - protein, 14 aa, Severe acute respiratory syndrome coronavirus 2
  REGION 1..14: note = Table B: HLA-DPA1*02:01-B1*13:01L
LDERIDKVLNEKCS

SEQ ID NO: 24215 - protein, 15 aa, Severe acute respiratory syndrome coronavirus 2
  REGION 1..15: note = Table B: HLA-DPA1*02:01-B1*13:01L
LNEKCSAYTVELGTE

SEQ ID NO: 24216 - protein, 12 aa, Severe acute respiratory syndrome coronavirus 2
  REGION 1..12: note = Table B: HLA-DPA1*02:01-B1*13:01L
VIKTLQPVSELL

SEQ ID NO: 24217 - protein, 10 aa, Severe acute respiratory syndrome coronavirus 2
  REGION 1..10: note = Table B: HLA-DPA1*02:01-B1*13:01L
EWSMATYYLF

SEQ ID NO: 24218 - protein, 15 aa, Severe acute respiratory syndrome coronavirus 2
  REGION 1..15: note = Table B: HLA-DPA1*02:01-B1*13:01L
ASHMYCSFYPPDEDE

SEQ ID NO: 24219 - protein, 14 aa, Severe acute respiratory syndrome coronavirus 2
  REGION 1..14: note = Table B: HLA-DPA1*02:01-B1*13:01L
AALQPEEEQEEDWL

SEQ ID NO: 24220 - protein, 15 aa, Severe acute respiratory syndrome coronavirus 2
  REGION 1..15: note = Table B: HLA-DPA1*02:01-B1*13:01L
LKLTDNVYIKNADIV

SEQ ID NO: 24221 - protein, 16 aa, Severe acute respiratory syndrome coronavirus 2
  REGION 1..16: note = Table B: HLA-DPA1*02:01-B1*13:01L HLA-DRB1*07:01L
IKNADIVEEAKKVKPT

SEQ ID NO: 24222 - protein, 14 aa, Severe acute respiratory syndrome coronavirus 2
  REGION 1..14: note = Table B: HLA-DPA1*02:01-B1*13:01L
TNNAMQVESDDYIA

SEQ ID NO: 24223 - protein, 15 aa, Severe acute respiratory syndrome coronavirus 2
  REGION 1..15: note = Table B: HLA-DPA1*02:01-B1*13:01L
ENFNQHEVLLAPLLS

SEQ ID NO: 24224 - protein, 15 aa, Severe acute respiratory syndrome coronavirus 2
  REGION 1..15: note = Table B: HLA-DPA1*02:01-B1*13:01L
HSLRVCVDTVRTNVY

SEQ ID NO: 24225 - protein, 19 aa, Severe acute respiratory syndrome coronavirus 2
  REGION 1..19: note = Table B: HLA-DPA1*02:01-B1*13:01L
PFITESKPSVEQRKQDDKK

SEQ ID NO: 24226 - protein, 13 aa, Severe acute respiratory syndrome coronavirus 2
  REGION 1..13: note = Table B: HLA-DPA1*02:01-B1*13:01L
YIDINGNLHPDSA

SEQ ID NO: 24227 - protein, 14 aa, Severe acute respiratory syndrome coronavirus 2
  REGION 1..14: note = Table B: HLA-DPA1*02:01-B1*13:01L
IDINGNLHPDSATL

SEQ ID NO: 24228 - protein, 15 aa, Severe acute respiratory syndrome coronavirus 2
  REGION 1..15: note = Table B: HLA-DPA1*02:01-B1*13:01L HLA-DPA1*01:03-B1*104:01L HLA-DRB1*15:01L
INGNLHPDSATLVSD

SEQ ID NO: 24229 - protein, 13 aa, Severe acute respiratory syndrome coronavirus 2
  REGION 1..13: note = Table B: HLA-DPA1*02:01-B1*13:01L
YGARFYFYTSKTT

SEQ ID NO: 24230 - protein, 12 aa, Severe acute respiratory syndrome coronavirus 2
  REGION 1..12: note = Table B: HLA-DPA1*02:01-B1*13:01L
LINTLNDLNETL

SEQ ID NO: 24231 - protein, 14 aa, Severe acute respiratory syndrome coronavirus 2
  REGION 1..14: note = Table B: HLA-DPA1*02:01-B1*13:01L HLA-DRB1*15:03L
GYVTHGLNLEEAAR

SEQ ID NO: 24232 - protein, 13 aa, Severe acute respiratory syndrome coronavirus 2
  REGION 1..13: note = Table B: HLA-DPA1*02:01-B1*13:01L
IETISLAGSYKDW

SEQ ID NO: 24233 - protein, 16 aa, Severe acute respiratory syndrome coronavirus 2
  REGION 1..16: note = Table B: HLA-DPA1*02:01-B1*13:01L
GQSTQLGIEFLKRGDK

SEQ ID NO: 24234 - protein, 16 aa, Severe acute respiratory syndrome coronavirus 2
  REGION 1..16: note = Table B: HLA-DPA1*02:01-B1*13:01L
LKRGDKSVYYTSNPTT

SEQ ID NO: 24235 - protein, 15 aa, Severe acute respiratory syndrome coronavirus 2
  REGION 1..15: note = Table B: HLA-DPA1*02:01-B1*13:01L
ADVTKIKPHNSHEGK

SEQ ID NO: 24236 - protein, 12 aa, Severe acute respiratory syndrome coronavirus 2
  REGION 1..12: note = Table B: HLA-DPA1*02:01-B1*13:01L HLA-DQA1*01:03-B1*06:01L HLA-DRB1*15:03L
RYMSALNHTKKW

SEQ ID NO: 24237 - protein, 10 aa, Severe acute respiratory syndrome coronavirus 2
  REGION 1..10: note = Table B: HLA-DPA1*02:01-B1*13:01L HLA-DQA1*03:01-B1*03:02L HLA-DRB1*16:01L HLA-DQA1*01:03-B1*06:01L HLA-DQA1*02:01-B1*03:03L
KWKYPQVNGL

SEQ ID NO: 24238 - protein, 15 aa, Severe acute respiratory syndrome coronavirus 2
  REGION 1..15: note = Table B: HLA-DPA1*02:01-B1*13:01L
ILAYCNKTVGELGDV

SEQ ID NO: 24239 - protein, 12 aa, Severe acute respiratory syndrome coronavirus 2
  REGION 1..12: note = Table B: HLA-DPA1*02:01-B1*13:01L
VGELGDVRETMS

SEQ ID NO: 24240 - protein, 14 aa, Severe acute respiratory syndrome coronavirus 2
  REGION 1..14: note = Table B: HLA-DPA1*02:01-B1*13:01L
LKHGTFTCASEYTG

SEQ ID NO: 24241 - protein, 16 aa, Severe acute respiratory syndrome coronavirus 2
  REGION 1..16: note = Table B: HLA-DPA1*02:01-B1*13:01L
GNYQCGHYKHITSKET

SEQ ID NO: 24242 - protein, 11 aa, Severe acute respiratory syndrome coronavirus 2
  REGION 1..11: note = Table B: HLA-DPA1*02:01-B1*13:01L HLA-DQA1*01:03-B1*06:01L HLA-DRB1*15:03L
HYKHITSKETL

SEQ ID NO: 24243 - protein, 14 aa, Severe acute respiratory syndrome coronavirus 2
  REGION 1..14: note = Table B: HLA-DPA1*02:01-B1*13:01L
TTIKPVTYKLDGVV

SEQ ID NO: 24244 - protein, 14 aa, Severe acute respiratory syndrome coronavirus 2
  REGION 1..14: note = Table B: HLA-DPA1*02:01-B1*13:01L
YFTEQPIDLVPNQP

SEQ ID NO: 24245 - protein, 14 aa, Severe acute respiratory syndrome coronavirus 2
  REGION 1..14: note = Table B: HLA-DPA1*02:01-B1*13:01L
FDNFKFVCDNIKFA

SEQ ID NO: 24246 - protein, 13 aa, Severe acute respiratory syndrome coronavirus 2
  REGION 1..13: note = Table B: HLA-DPA1*02:01-B1*13:01L HLA-DQA1*01:03-B1*06:01L
LNQLTGYKKPASR

SEQ ID NO: 24247 - protein, 14 aa, Severe acute respiratory syndrome coronavirus 2
  REGION 1..14: note = Table B: HLA-DPA1*02:01-B1*13:01L HLA-DPA1*03:01-B1*105:01L HLA-DRB1*08:02L
NQLTGYKKPASREL

SEQ ID NO: 24248 - protein, 16 aa, Severe acute respiratory syndrome coronavirus 2
  REGION 1..16: note = Table B: HLA-DPA1*02:01-B1*13:01L
AKLLHKPIVWHVNNAT

SEQ ID NO: 24249 - protein, 14 aa, Severe acute respiratory syndrome coronavirus 2
  REGION 1..14: note = Table B: HLA-DPA1*02:01-B1*13:01L
LHKPIVWHVNNATN

SEQ ID NO: 24250 - protein, 13 aa, Severe acute respiratory syndrome coronavirus 2
  REGION 1..13: note = Table B: HLA-DPA1*02:01-B1*13:01L
DLKPVSEEVVENP

SEQ ID NO: 24251 - protein, 16 aa, Severe acute respiratory syndrome coronavirus 2
  REGION 1..16: note = Table B: HLA-DPA1*02:01-B1*13:01L
DVLECNVKTTEVVGDI

SEQ ID NO: 24252 - protein, 15 aa, Severe acute respiratory syndrome coronavirus 2
  REGION 1..15: note = Table B: HLA-DPA1*02:01-B1*13:01L
IILKPANNSLKITEE

SEQ ID NO: 24253 - protein, 13 aa, Severe acute respiratory syndrome coronavirus 2
  REGION 1..13: note = Table B: HLA-DPA1*02:01-B1*13:01L
LKITEEVGHTDLM

SEQ ID NO: 24254 - protein, 12 aa, Severe acute respiratory syndrome coronavirus 2
  REGION 1..12: note = Table B: HLA-DPA1*02:01-B1*13:01L HLA-DPA1*01:03-B1*104:01L
KVVSTTTNIVTR

SEQ ID NO: 24255 - protein, 14 aa, Severe acute respiratory syndrome coronavirus 2
  REGION 1..14: note = Table B: HLA-DPA1*02:01-B1*13:01L HLA-DPA1*01:02-B1*04:01L
SRIKASMPTTIAKN

SEQ ID NO: 24256 - protein, 14 aa, Severe acute respiratory syndrome coronavirus 2
  REGION 1..14: note = Table B: HLA-DPA1*02:01-B1*13:01L HLA-DPA1*03:01-B1*105:01L HLA-DQA1*01:03-B1*06:01L
VKSVGKFCLEASFN

SEQ ID NO: 24257 - protein, 11 aa, Severe acute respiratory syndrome coronavirus 2
  REGION 1..11: note = Table B: HLA-DPA1*02:01-B1*13:01L
YPSLETIQITI

SEQ ID NO: 24258 - protein, 10 aa, Severe acute respiratory syndrome coronavirus 2
  REGION 1..10: note = Table B: HLA-DPA1*02:01-B1*13:01L HLA-DQA1*01:03-B1*06:01L
IFFASFYYVW

SEQ ID NO: 24259 - protein, 13 aa, Severe acute respiratory syndrome coronavirus 2
  REGION 1..13: note = Table B: HLA-DPA1*02:01-B1*13:01L
LQFKRPINPTDQS

SEQ ID NO: 24260 - protein, 16 aa, Severe acute respiratory syndrome coronavirus 2
  REGION 1..16: note = Table B: HLA-DPA1*02:01-B1*13:01L
PILLLDQALVSDVGDS

SEQ ID NO: 24261 - protein, 14 aa, Severe acute respiratory syndrome coronavirus 2
  REGION 1..14: note = Table B: HLA-DPA1*02:01-B1*13:01L HLA-DPA1*03:01-B1*105:01L
LDQALVSDVGDSAE

SEQ ID NO: 24262 - protein, 13 aa, Severe acute respiratory syndrome coronavirus 2
  REGION 1..13: note = Table B: HLA-DPA1*02:01-B1*13:01L
LTYNKVENMTPRD

SEQ ID NO: 24263 - protein, 14 aa, Severe acute respiratory syndrome coronavirus 2
  REGION 1..14: note = Table B: HLA-DPA1*02:01-B1*13:01L
RHINAQVAKSHNIA

SEQ ID NO: 24264 - protein, 13 aa, Severe acute respiratory syndrome coronavirus 2
  REGION 1..13: note = Table B: HLA-DPA1*02:01-B1*13:01L
QVAKSHNIALIWN

SEQ ID NO: 24265 - protein, 15 aa, Severe acute respiratory syndrome coronavirus 2
  REGION 1..15: note = Table B: HLA-DPA1*02:01-B1*13:01L
KQIRSAAKKNNLPFK

SEQ ID NO: 24266 - protein, 15 aa, Severe acute respiratory syndrome coronavirus 2
  REGION 1..15: note = Table B: HLA-DPA1*02:01-B1*13:01L
TDTCFANKHADFDTW

SEQ ID NO: 24267 - protein, 12 aa, Severe acute respiratory syndrome coronavirus 2
  REGION 1..12: note = Table B: HLA-DPA1*02:01-B1*13:01L
GSYTNDKACPLI

SEQ ID NO: 24268 - protein, 16 aa, Severe acute respiratory syndrome coronavirus 2
  REGION 1..16: note = Table B: HLA-DPA1*02:01-B1*13:01L
VLAAECTIFKDASGKP

SEQ ID NO: 24269 - protein, 14 aa, Severe acute respiratory syndrome coronavirus 2
  REGION 1..14: note = Table B: HLA-DPA1*02:01-B1*13:01L
TSGRWVLNNDYYRS

SEQ ID NO: 24270 - protein, 11 aa, Severe acute respiratory syndrome coronavirus 2
  REGION 1..11: note = Table B: HLA-DPA1*02:01-B1*13:01L
AYIICISTKHF

SEQ ID NO: 24271 - protein, 16 aa, Severe acute respiratory syndrome coronavirus 2
  REGION 1..16: note = Table B: HLA-DPA1*02:01-B1*13:01L
YWFFSNYLKRRVVFNG

SEQ ID NO: 24272 - protein, 16 aa, Severe acute respiratory syndrome coronavirus 2
  REGION 1..16: note = Table B: HLA-DPA1*02:01-B1*13:01L
FFSNYLKRRVVFNGVS

SEQ ID NO: 24273 - protein, 12 aa, Severe acute respiratory syndrome coronavirus 2
  REGION 1..12: note = Table B: HLA-DPA1*02:01-B1*13:01L HLA-DPA1*03:01-B1*105:01L HLA-DRB1*16:01L HLA-DRB1*15:03L
KYKYFSGAMDTT

SEQ ID NO: 24274 - protein, 13 aa, Severe acute respiratory syndrome coronavirus 2
  REGION 1..13: note = Table B: HLA-DPA1*02:01-B1*13:01L
SYREAACCHLAKA

SEQ ID NO: 24275 - protein, 16 aa, Severe acute respiratory syndrome coronavirus 2
  REGION 1..16: note = Table B: HLA-DPA1*02:01-B1*13:01L
PPQTSITSAVLQSGFR

SEQ ID NO: 24276 - protein, 13 aa, Severe acute respiratory syndrome coronavirus 2
  REGION 1..13: note = Table B: HLA-DPA1*02:01-B1*13:01L
GFRKMAFPSGKVE

SEQ ID NO: 24277 - protein, 13 aa, Severe acute respiratory syndrome coronavirus 2
  REGION 1..13: note = Table B: HLA-DPA1*02:01-B1*13:01L
FRKMAFPSGKVEG

SEQ ID NO: 24278 - protein, 16 aa, Severe acute respiratory syndrome coronavirus 2
  REGION 1..16: note = Table B: HLA-DPA1*02:01-B1*13:01L
NGLWLDDVVYCPRHVI

SEQ ID NO: 24279 - protein, 19 aa, Severe acute respiratory syndrome coronavirus 2
  REGION 1..19: note = Table B: HLA-DPA1*02:01-B1*13:01L
CPRHVICTSEDMLNPNYED

SEQ ID NO: 24280 - protein, 14 aa, Severe acute respiratory syndrome coronavirus 2
  REGION 1..14: note = Table B: HLA-DPA1*02:01-B1*13:01L HLA-DPA1*03:01-B1*105:01L
AGNVQLRVIGHSMQ

SEQ ID NO: 24281 - protein, 10 aa, Severe acute respiratory syndrome coronavirus 2
  REGION 1..10: note = Table B: HLA-DPA1*02:01-B1*13:01L HLA-DQA1*01:03-B1*06:01L HLA-DQA1*02:01-B1*03:03L
NRFTTTLNDF

SEQ ID NO: 24282 - protein, 11 aa, Severe acute respiratory syndrome coronavirus 2
  REGION 1..11: note = Table B: HLA-DPA1*02:01-B1*13:01L HLA-DRB1*15:03L
RFTTTLNDFNL

SEQ ID NO: 24283 - protein, 13 aa, Severe acute respiratory syndrome coronavirus 2
  REGION 1..13: note = Table B: HLA-DPA1*02:01-B1*13:01L
RTILGSALLEDEF

SEQ ID NO: 24284 - protein, 13 aa, Severe acute respiratory syndrome coronavirus 2
  REGION 1..13: note = Table B: HLA-DPA1*02:01-B1*13:01L HLA-DRB1*16:01L
ALLEDEFTPFDVV

SEQ ID NO: 24285 - protein, 15 aa, Severe acute respiratory syndrome coronavirus 2
  REGION 1..15: note = Table B: HLA-DPA1*02:01-B1*13:01L HLA-DPA1*01:03-B1*104:01L
FKLKDCVMYASAVVL

SEQ ID NO: 24286 - protein, 19 aa, Severe acute respiratory syndrome coronavirus 2
  REGION 1..19: note = Table B: HLA-DPA1*02:01-B1*13:01L
PPKNSIDAFKLNIKLLGVG

SEQ ID NO: 24287 - protein, 16 aa, Severe acute respiratory syndrome coronavirus 2
  REGION 1..16: note = Table B: HLA-DPA1*02:01-B1*13:01L
GKPCIKVATVQSKMSD

SEQ ID NO: 24288 - protein, 15 aa, Severe acute respiratory syndrome coronavirus 2
  REGION 1..15: note = Table B: HLA-DPA1*02:01-B1*13:01L
GAVDINKLCEEMLDN

SEQ ID NO: 24289 - protein, 13 aa, Severe acute respiratory syndrome coronavirus 2
  REGION 1..13: note = Table B: HLA-DPA1*02:01-B1*13:01L
KRAKVTSAMQTML

SEQ ID NO: 24290 - protein, 14 aa, Severe acute respiratory syndrome coronavirus 2
  REGION 1..14: note = Table B: HLA-DPA1*02:01-B1*13:01L
KIVQLSEISMDNSP

SEQ ID NO: 24291 - protein, 16 aa, Severe acute respiratory syndrome coronavirus 2
  REGION 1..16: note = Table B: HLA-DPA1*02:01-B1*13:01L
ISMDNSPNLAWPLIVT

SEQ ID NO: 24292 - protein, 14 aa, Severe acute respiratory syndrome coronavirus 2
  REGION 1..14: note = Table B: HLA-DPA1*02:01-B1*13:01L HLA-DRB1*04:08L
AGNATEVPANSTVL

SEQ ID NO: 24293 - protein, 16 aa, Severe acute respiratory syndrome coronavirus 2
  REGION 1..16: note = Table B: HLA-DPA1*02:01-B1*13:01L
GMWKGYGCSCDQLREP

SEQ ID NO: 24294 - protein, 14 aa, Severe acute respiratory syndrome coronavirus 2
  REGION 1..14: note = Table B: HLA-DPA1*02:01-B1*13:01L
YNDKVAGFAKFLKT

SEQ ID NO: 24295 - protein, 18 aa, Severe acute respiratory syndrome coronavirus 2
  REGION 1..18: note = Table B: HLA-DPA1*02:01-B1*13:01L
GFAKFLKTNCCRFQEKDE

SEQ ID NO: 24296 - protein, 14 aa, Severe acute respiratory syndrome coronavirus 2
  REGION 1..14: note = Table B: HLA-DPA1*02:01-B1*13:01L HLA-DPA1*03:01-B1*105:01L
FQEKDEDDNLIDSY

SEQ ID NO: 24297 - protein, 15 aa, Severe acute respiratory syndrome coronavirus 2
  REGION 1..15: note = Table B: HLA-DPA1*02:01-B1*13:01L
DEDDNLIDSYFVVKR

SEQ ID NO: 24298 - protein, 12 aa, Severe acute respiratory syndrome coronavirus 2
  REGION 1..12: note = Table B: HLA-DPA1*02:01-B1*13:01L HLA-DRB1*15:03L
FKFRIDGDMVPH

SEQ ID NO: 24299 - protein, 14 aa, Severe acute respiratory syndrome coronavirus 2
  REGION 1..14: note = Table B: HLA-DPA1*02:01-B1*13:01L
IDGDMVPHISRQRL

SEQ ID NO: 24300 - protein, 11 aa, Severe acute respiratory syndrome coronavirus 2
  REGION 1..11: note = Table B: HLA-DPA1*02:01-B1*13:01L HLA-DQA1*01:03-B1*06:01L
KYTMADLVYAL

SEQ ID NO: 24301 - protein, 13 aa, Severe acute respiratory syndrome coronavirus 2
  REGION 1..13: note = Table B: HLA-DPA1*02:01-B1*13:01L
ALRHFDEGNCDTL

SEQ ID NO: 24302 - protein, 15 aa, Severe acute respiratory syndrome coronavirus 2
  REGION 1..15: note = Table B: HLA-DPA1*02:01-B1*13:01L
LKEILVTYNCCDDDY

SEQ ID NO: 24303 - protein, 14 aa, Severe acute respiratory syndrome coronavirus 2
  REGION 1..14: note = Table B: HLA-DPA1*02:01-B1*13:01L
ALLKTVQFCDAMRN

SEQ ID NO: 24304 - protein, 15 aa, Severe acute respiratory syndrome coronavirus 2
  REGION 1..15: note = Table B: HLA-DPA1*02:01-B1*13:01L HLA-DRB1*15:03L
DNQDLNGNWYDFGDF

SEQ ID NO: 24305 - protein, 10 aa, Severe acute respiratory syndrome coronavirus 2
  REGION 1..10: note = Table B: HLA-DPA1*02:01-B1*13:01L HLA-DQA1*01:03-B1*06:01L
SYYSLLMPIL

SEQ ID NO: 24306 - protein, 13 aa, Severe acute respiratory syndrome coronavirus 2
  REGION 1..13: note = Table B: HLA-DPA1*02:01-B1*13:01L
DLTKPYIKWDLLK

SEQ ID NO: 24307 - protein, 11 aa, Severe acute respiratory syndrome coronavirus 2
  REGION 1..11: note = Table B: HLA-DPA1*02:01-B1*13:01L
VFPPTSFGPLV

SEQ ID NO: 24308 - protein, 14 aa, Severe acute respiratory syndrome coronavirus 2
  REGION 1..14: note = Table B: HLA-DPA1*02:01-B1*13:01L HLA-DRB1*15:03L
FGPLVRKIFVDGVP

SEQ ID NO: 24309 - protein, 14 aa, Severe acute respiratory syndrome coronavirus 2
  REGION 1..14: note = Table B: HLA-DPA1*02:01-B1*13:01L
TGYHFRELGVVHNQ

SEQ ID NO: 24310 - protein, 13 aa, Severe acute respiratory syndrome coronavirus 2
  REGION 1..13: note = Table B: HLA-DPA1*02:01-B1*13:01L
YAADPAMHAASGN

SEQ ID NO: 24311 - protein, 14 aa, Severe acute respiratory syndrome coronavirus 2
  REGION 1..14: note = Table B: HLA-DPA1*02:01-B1*13:01L HLA-DRB1*16:01L HLA-DRB1*15:03L
PGNFNKDFYDFAVS

SEQ ID NO: 24312 - protein, 14 aa, Severe acute respiratory syndrome coronavirus 2
  REGION 1..14: note = Table B: HLA-DPA1*02:01-B1*13:01L HLA-DRB1*07:01L
KHFFFAQDGNAAIS

SEQ ID NO: 24313 - protein, 14 aa, Severe acute respiratory syndrome coronavirus 2
  REGION 1..14: note = Table B: HLA-DPA1*02:01-B1*13:01L HLA-DRB1*15:03L
ISDYDYYRYNLPTM

SEQ ID NO: 24314 - protein, 16 aa, Severe acute respiratory syndrome coronavirus 2
  REGION 1..16: note = Table B: HLA-DPA1*02:01-B1*13:01L
IPTITQMNLKYAISAK

SEQ ID NO: 24315 - protein, 13 aa, Severe acute respiratory syndrome coronavirus 2
  REGION 1..13: note = Table B: HLA-DPA1*02:01-B1*13:01L
NRARTVAGVSICS

SEQ ID NO: 24316 - protein, 13 aa, Severe acute respiratory syndrome coronavirus 2
  REGION 1..13: note = Table B: HLA-DPA1*02:01-B1*13:01L
ATRGATVVIGTSK

SEQ ID NO: 24317 - protein, 10 aa, Severe acute respiratory syndrome coronavirus 2
  REGION 1..10: note = Table B: HLA-DPA1*02:01-B1*13:01L HLA-DQA1*01:03-B1*06:01L
KFYGGWHNML

SEQ ID NO: 24318 - protein, 12 aa, Severe acute respiratory syndrome coronavirus 2
  REGION 1..12: note = Table B: HLA-DPA1*02:01-B1*13:01L
LKTVYSDVENPH

SEQ ID NO: 24319 - protein, 15 aa, Severe acute respiratory syndrome coronavirus 2
  REGION 1..15: note = Table B: HLA-DPA1*02:01-B1*13:01L
LRIMASLVLARKHTT

SEQ ID NO: 24320 - protein, 12 aa, Severe acute respiratory syndrome coronavirus 2
  REGION 1..12: note = Table B: HLA-DPA1*02:01-B1*13:01L HLA-DRB1*16:01L
RFYRLANECAQV

SEQ ID NO: 24321 - protein, 14 aa, Severe acute respiratory syndrome coronavirus 2
  REGION 1..14: note = Table B: HLA-DPA1*02:01-B1*13:01L HLA-DPA1*01:03-B1*104:01L
YRLANECAQVLSEM

SEQ ID NO: 24322 - protein, 10 aa, Severe acute respiratory syndrome coronavirus 2
  REGION 1..10: note = Table B: HLA-DPA1*02:01-B1*13:01L HLA-DQA1*01:03-B1*06:01L
AYANSVFNIC

SEQ ID NO: 24323 - protein, 14 aa, Severe acute respiratory syndrome coronavirus 2
  REGION 1..14: note = Table B: HLA-DPA1*02:01-B1*13:01L
QHRLYECLYRNRDV

SEQ ID NO: 24324 - protein, 11 aa, Severe acute respiratory syndrome coronavirus 2
  REGION 1..11: note = Table B: HLA-DPA1*02:01-B1*13:01L
TYASQGLVASI

SEQ ID NO: 24325 - protein, 16 aa, Severe acute respiratory syndrome coronavirus 2
  REGION 1..16: note = Table B: HLA-DPA1*02:01-B1*13:01L
MLVKQGDDYVYLPYPD

SEQ ID NO: 24326 - protein, 13 aa, Severe acute respiratory syndrome coronavirus 2
  REGION 1..13: note = Table B: HLA-DPA1*02:01-B1*13:01L
AIDAYPLTKHPNQ

SEQ ID NO: 24327 - protein, 13 aa, Severe acute respiratory syndrome coronavirus 2
  REGION 1..13: note = Table B: HLA-DPA1*02:01-B1*13:01L
IRKLHDELTGHML

SEQ ID NO: 24328 - protein, 14 aa, Severe acute respiratory syndrome coronavirus 2
  REGION 1..14: note = Table B: HLA-DPA1*02:01-B1*13:01L
YDHVISTSHKLVLS

SEQ ID NO: 24329 - protein, 14 aa, Severe acute respiratory syndrome coronavirus 2
  REGION 1..14: note = Table B: HLA-DPA1*02:01-B1*13:01L HLA-DQA1*05:05-B1*03:01L HLA-DQA1*01:03-B1*06:01L
ATEETFKLSYGIAT

SEQ ID NO: 24330 - protein, 13 aa, Severe acute respiratory syndrome coronavirus 2
  REGION 1..13: note = Table B: HLA-DPA1*02:01-B1*13:01L
LSDRELHLSWEVG

SEQ ID NO: 24331 - protein, 14 aa, Severe acute respiratory syndrome coronavirus 2
  REGION 1..14: note = Table B: HLA-DPA1*02:01-B1*13:01L
SDRELHLSWEVGKP

SEQ ID NO: 24332 - protein, 15 aa, Severe acute respiratory syndrome coronavirus 2
  REGION 1..15: note = Table B: HLA-DPA1*02:01-B1*13:01L
YFVLTSHTVMPLSAP

SEQ ID NO: 24333 - protein, 16 aa, Severe acute respiratory syndrome coronavirus 2
  REGION 1..16: note = Table B: HLA-DPA1*02:01-B1*13:01L HLA-DPA1*03:01-B1*105:01L HLA-DQA1*01:03-B1*06:01L
VDALCEKALKYLPIDK

SEQ ID NO: 24334 - protein, 11 aa, Severe acute respiratory syndrome coronavirus 2
  REGION 1..11: note = Table B: HLA-DPA1*02:01-B1*13:01L HLA-DQA1*01:03-B1*06:01L
KYLPIDKCSRI

SEQ ID NO: 24335 - protein, 13 aa, Severe acute respiratory syndrome coronavirus 2
  REGION 1..13: note = Table B: HLA-DPA1*02:01-B1*13:01L
VDTVSALVYDNKL

SEQ ID NO: 24336 - protein, 16 aa, Severe acute respiratory syndrome coronavirus 2
  REGION 1..16: note = Table B: HLA-DPA1*02:01-B1*13:01L
ALVYDNKLKAHKDKSA

SEQ ID NO: 24337 - protein, 15 aa, Severe acute respiratory syndrome coronavirus 2
  REGION 1..15: note = Table B: HLA-DPA1*02:01-B1*13:01L
VYDNKLKAHKDKSAQ

SEQ ID NO: 24338 - protein, 13 aa, Severe acute respiratory syndrome coronavirus 2
  REGION 1..13: note = Table B: HLA-DPA1*02:01-B1*13:01L
ITHDVSSAINRPQ

SEQ ID NO: 24339 - protein, 13 aa, Severe acute respiratory syndrome coronavirus 2
  REGION 1..13: note = Table B: HLA-DPA1*02:01-B1*13:01L
FNVAITRAKVGIL

SEQ ID NO: 24340 - protein, 16 aa, Severe acute respiratory syndrome coronavirus 2
  REGION 1..16: note = Table B: HLA-DPA1*02:01-B1*13:01L
GILCIMSDRDLYDKLQ

SEQ ID NO: 24341 - protein, 11 aa, Severe acute respiratory syndrome coronavirus 2
  REGION 1..11: note = Table B: HLA-DPA1*02:01-B1*13:01L HLA-DQA1*01:03-B1*06:01L
TLQAENVTGLF

SEQ ID NO: 24342 - protein, 18 aa, Severe acute respiratory syndrome coronavirus 2
  REGION 1..18: note = Table B: HLA-DPA1*02:01-B1*13:01L
YRRLISMMGFKMNYQVNG

SEQ ID NO: 24343 - protein, 16 aa, Severe acute respiratory syndrome coronavirus 2
  REGION 1..16: note = Table B: HLA-DPA1*02:01-B1*13:01L HLA-DPA1*01:03-B1*104:01L
TGVNLVAVPTGYVDTP

SEQ ID NO: 24344 - protein, 16 aa, Severe acute respiratory syndrome coronavirus 2
  REGION 1..16: note = Table B: HLA-DPA1*02:01-B1*13:01L
VQMLSDTLKNLSDRVV

SEQ ID NO: 24345 - protein, 14 aa, Severe acute respiratory syndrome coronavirus 2
  REGION 1..14: note = Table B: HLA-DPA1*02:01-B1*13:01L HLA-DRB1*15:03L
IDVQQWGFTGNLQS

SEQ ID NO: 24346 - protein, 16 aa, Severe acute respiratory syndrome coronavirus 2
  REGION 1..16: note = Table B: HLA-DPA1*02:01-B1*13:01L
GNLQSNHDLYCQVHGN

SEQ ID NO: 24347 - protein, 14 aa, Severe acute respiratory syndrome coronavirus 2
  REGION 1..14: note = Table B: HLA-DPA1*02:01-B1*13:01L
KFYDAQPCSDKAYK

SEQ ID NO: 24348 - protein, 14 aa, Severe acute respiratory syndrome coronavirus 2
  REGION 1..14: note = Table B: HLA-DPA1*02:01-B1*13:01L
LFWNCNVDRYPANS

SEQ ID NO: 24349 - protein, 13 aa, Severe acute respiratory syndrome coronavirus 2
  REGION 1..13: note = Table B: HLA-DPA1*02:01-B1*13:01L
VCRFDTRVLSNLN

SEQ ID NO: 24350 - protein, 15 aa, Severe acute respiratory syndrome coronavirus 2
  REGION 1..15: note = Table B: HLA-DPA1*02:01-B1*13:01L
TRVLSNLNLPGCDGG

SEQ ID NO: 24351 - protein, 14 aa, Severe acute respiratory syndrome coronavirus 2
  REGION 1..14: note = Table B: HLA-DPA1*02:01-B1*13:01L
SHGKQVVSDIDYVP

SEQ ID NO: 24352 - protein, 15 aa, Severe acute respiratory syndrome coronavirus 2
  REGION 1..15: note = Table B: HLA-DPA1*02:01-B1*13:01L HLA-DQA1*05:05-B1*03:01L
VPLKSATCITRCNLG

SEQ ID NO: 24353 - protein, 10 aa, Severe acute respiratory syndrome coronavirus 2
  REGION 1..10: note = Table B: HLA-DPA1*02:01-B1*13:01L
LYLDAYNMMI

SEQ ID NO: 24354 - protein, 10 aa, Severe acute respiratory syndrome coronavirus 2
  REGION 1..10: note = Table B: HLA-DPA1*02:01-B1*13:01L HLA-DQA1*01:03-B1*06:01L
GFSLWVYKQF

SEQ ID NO: 24355 - protein, 11 aa, Severe acute respiratory syndrome coronavirus 2
  REGION 1..11: note = Table B: HLA-DPA1*02:01-B1*13:01L HLA-DQA1*01:03-B1*06:01L
QFDTYNLWNTF

SEQ ID NO: 24356 - protein, 15 aa, Severe acute respiratory syndrome coronavirus 2
  REGION 1..15: note = Table B: HLA-DPA1*02:01-B1*13:01L HLA-DQA1*01:03-B1*06:01L
VPEVKILNNLGVDIA

SEQ ID NO: 24357 - protein, 14 aa, Severe acute respiratory syndrome coronavirus 2
  REGION 1..14: note = Table B: HLA-DPA1*02:01-B1*13:01L
KILNNLGVDIAANT

SEQ ID NO: 24358 - protein, 16 aa, Severe acute respiratory syndrome coronavirus 2
  REGION 1..16: note = Table B: HLA-DPA1*02:01-B1*13:01L
IGVCSMTDIAKKPTET

SEQ ID NO: 24359 - protein, 16 aa, Severe acute respiratory syndrome coronavirus 2
  REGION 1..16: note = Table B: HLA-DPA1*02:01-B1*13:01L
DGRVDGQVDLFRNARN

SEQ ID NO: 24360 - protein, 15 aa, Severe acute respiratory syndrome coronavirus 2
  REGION 1..15: note = Table B: HLA-DPA1*02:01-B1*13:01L
VGPKQASLNGVTLIG

SEQ ID NO: 24361 - protein, 13 aa, Severe acute respiratory syndrome coronavirus 2
  REGION 1..13: note = Table B: HLA-DPA1*02:01-B1*13:01L
FKPRSQMEIDFLE

SEQ ID NO: 24362 - protein, 10 aa, Severe acute respiratory syndrome coronavirus 2
  REGION 1..10: note = Table B: HLA-DPA1*02:01-B1*13:01L HLA-DQA1*01:03-B1*06:01L
DFLELAMDEF

SEQ ID NO: 24363 - protein, 13 aa, Severe acute respiratory syndrome coronavirus 2
  REGION 1..13: note = Table B: HLA-DPA1*02:01-B1*13:01L
KRFKESPFELEDF

SEQ ID NO: 24364 - protein, 14 aa, Severe acute respiratory syndrome coronavirus 2
  REGION 1..14: note = Table B: HLA-DPA1*02:01-B1*13:01L
RFKESPFELEDFIP

SEQ ID NO: 24365 - protein, 14 aa, Severe acute respiratory syndrome coronavirus 2
  REGION 1..14: note = Table B: HLA-DPA1*02:01-B1*13:01L HLA-DRB1*04:08L
IKSQDLSVVSKVVK

SEQ ID NO: 24366 - protein, 16 aa, Severe acute respiratory syndrome coronavirus 2
  REGION 1..16: note = Table B: HLA-DPA1*02:01-B1*13:01L HLA-DRB1*15:03L
QPGVAMPNLYKMQRML

SEQ ID NO: 24367 - protein, 16 aa, Severe acute respiratory syndrome coronavirus 2
  REGION 1..16: note = Table B: HLA-DPA1*02:01-B1*13:01L HLA-DRB1*15:03L
LYKMQRMLLEKCDLQN

SEQ ID NO: 24368 - protein, 14 aa, Severe acute respiratory syndrome coronavirus 2
  REGION 1..14: note = Table B: HLA-DPA1*02:01-B1*13:01L
TVHTANKWDLIISD

SEQ ID NO: 24369 - protein, 14 aa, Severe acute respiratory syndrome coronavirus 2
  REGION 1..14: note = Table B: HLA-DPA1*02:01-B1*13:01L
VHTANKWDLIISDM

SEQ ID NO: 24370 - protein, 14 aa, Severe acute respiratory syndrome coronavirus 2
  REGION 1..14: note = Table B: HLA-DPA1*02:01-B1*13:01L
YDPKTKNVTKENDS

SEQ ID NO: 24371 - protein, 13 aa, Severe acute respiratory syndrome coronavirus 2
  REGION 1..13: note = Table B: HLA-DPA1*02:01-B1*13:01L
NVTKENDSKEGFF

SEQ ID NO: 24372 - protein, 14 aa, Severe acute respiratory syndrome coronavirus 2
  REGION 1..14: note = Table B: HLA-DPA1*02:01-B1*13:01L
SKEGFFTYICGFIQ

SEQ ID NO: 24373 - protein, 14 aa, Severe acute respiratory syndrome coronavirus 2
  REGION 1..14: note = Table B: HLA-DPA1*02:01-B1*13:01L
ALGGSVAIKITEHS

SEQ ID NO: 24374 - protein, 13 aa, Severe acute respiratory syndrome coronavirus 2
  REGION 1..13: note = Table B: HLA-DPA1*02:01-B1*13:01L
AIKITEHSWNADL

SEQ ID NO: 24375 - protein, 12 aa, Severe acute respiratory syndrome coronavirus 2
  REGION 1..12: note = Table B: HLA-DPA1*02:01-B1*13:01L HLA-DPA1*03:01-B1*105:01L
KITEHSWNADLY

SEQ ID NO: 24376 - protein, 12 aa, Severe acute respiratory syndrome coronavirus 2
  REGION 1..12: note = Table B: HLA-DPA1*02:01-B1*13:01L HLA-DQA1*05:05-B1*03:01L
SLKEGQINDMIL

SEQ ID NO: 24377 - protein, 14 aa, Severe acute respiratory syndrome coronavirus 2
  REGION 1..14: note = Table B: HLA-DPA1*02:01-B1*13:01L HLA-DPA1*03:01-B1*105:01L HLA-DQA1*05:05-B1*03:01L HLA-DQA1*01:03-B1*06:01L
IIRENNRVVISSDV

SEQ ID NO: 24378 - protein, 14 aa, Severe acute respiratory syndrome coronavirus 2
  REGION 1..14: note = Table B: HLA-DPA1*02:01-B1*13:01L
IRENNRVVISSDVL

SEQ ID NO: 24379 - protein, 11 aa, Severe acute respiratory syndrome coronavirus 2
  REGION 1..11: note = Table B: HLA-DPA1*02:01-B1*13:01L HLA-DQA1*01:03-B1*06:01L
VFKNIDGYFKI

SEQ ID NO: 24380 - protein, 16 aa, Severe acute respiratory syndrome coronavirus 2
  REGION 1..16: note = Table B: HLA-DPA1*02:01-B1*13:01L
DSSSGWTAGAAAYYVG

SEQ ID NO: 24381 - protein, 16 aa, Severe acute respiratory syndrome coronavirus 2
  REGION 1..16: note = Table B: HLA-DPA1*02:01-B1*13:01L HLA-DQA1*05:05-B1*03:01L HLA-DQA1*02:01-B1*03:03L
DPLSETKCTLKSFTVE

SEQ ID NO: 24382 - protein, 13 aa, Severe acute respiratory syndrome coronavirus 2
  REGION 1..13: note = Table B: HLA-DPA1*02:01-B1*13:01L
VSPTKLNDLCFTN

SEQ ID NO: 24383 - protein, 10 aa, Severe acute respiratory syndrome coronavirus 2
  REGION 1..10: note = Table B: HLA-DPA1*02:01-B1*13:01L
CYFPLQSYGF

SEQ ID NO: 24384 - protein, 15 aa, Severe acute respiratory syndrome coronavirus 2
  REGION 1..15: note = Table B: HLA-DPA1*02:01-B1*13:01L HLA-DPA1*03:01-B1*105:01L HLA-DRB1*16:01L
TNLVKNKCVNFNFNG

SEQ ID NO: 24385 - protein, 13 aa, Severe acute respiratory syndrome coronavirus 2
  REGION 1..13: note = Table B: HLA-DPA1*02:01-B1*13:01L
RDIADTTDAVRDP

SEQ ID NO: 24386 - protein, 13 aa, Severe acute respiratory syndrome coronavirus 2
  REGION 1..13: note = Table B: HLA-DPA1*02:01-B1*13:01L
DTTDAVRDPQTLE

SEQ ID NO: 24387 - protein, 12 aa, Severe acute respiratory syndrome coronavirus 2
  REGION 1..12: note = Table B: HLA-DPA1*02:01-B1*13:01L
NRALTGIAVEQD

SEQ ID NO: 24388 - protein, 15 aa, Severe acute respiratory syndrome coronavirus 2
  REGION 1..15: note = Table B: HLA-DPA1*02:01-B1*13:01L
DPSKPSKRSFIEDLL

SEQ ID NO: 24389 - protein, 15 aa, Severe acute respiratory syndrome coronavirus 2
  REGION 1..15: note = Table B: HLA-DPA1*02:01-B1*13:01L
GAALQIPFAMQMAYR

SEQ ID NO: 24390 - protein, 10 aa, Severe acute respiratory syndrome coronavirus 2
  REGION 1..10: note = Table B: HLA-DPA1*02:01-B1*13:01L HLA-DQA1*01:03-B1*06:01L
PFAMQMAYRF

SEQ ID NO: 24391 - protein, 13 aa, Severe acute respiratory syndrome coronavirus 2
  REGION 1..13: note = Table B: HLA-DPA1*02:01-B1*13:01L
AYRFNGIGVTQNV

SEQ ID NO: 24392 - protein, 14 aa, Severe acute respiratory syndrome coronavirus 2
  REGION 1..14: note = Table B: HLA-DPA1*02:01-B1*13:01L
IGVTQNVLYENQKL

SEQ ID NO: 24393 - protein, 14 aa, Severe acute respiratory syndrome coronavirus 2
  REGION 1..14: note = Table B: HLA-DPA1*02:01-B1*13:01L
LNDILSRLDKVEAE

SEQ ID NO: 24394 - protein, 12 aa, Severe acute respiratory syndrome coronavirus 2
  REGION 1..12: note = Table B: HLA-DPA1*02:01-B1*13:01L
RLDKVEAEVQID

SEQ ID NO: 24395 - protein, 13 aa, Severe acute respiratory syndrome coronavirus 2
  REGION 1..13: note = Table B: HLA-DPA1*02:01-B1*13:01L
YVTQQLIRAAEIR

SEQ ID NO: 24396 - protein, 14 aa, Severe acute respiratory syndrome coronavirus 2
  REGION 1..14: note = Table B: HLA-DPA1*02:01-B1*13:01L
IRASANLAATKMSE

SEQ ID NO: 24397 - protein, 14 aa, Severe acute respiratory syndrome coronavirus 2
  REGION 1..14: note = Table B: HLA-DPA1*02:01-B1*13:01L
NIQKEIDRLNEVAK

SEQ ID NO: 24398 - protein, 10 aa, Severe acute respiratory syndrome coronavirus 2
  REGION 1..10: note = Table B: HLA-DPA1*02:01-B1*13:01L HLA-DQA1*01:03-B1*06:01L
KWPWYIWLGF

SEQ ID NO: 24399 - protein, 18 aa, Severe acute respiratory syndrome coronavirus 2
  REGION 1..18: note = Table B: HLA-DPA1*02:01-B1*13:01L
TIGTVTLKQGEIKDATPS

SEQ ID NO: 24400 - protein, 18 aa, Severe acute respiratory syndrome coronavirus 2
  REGION 1..18: note = Table B: HLA-DPA1*02:01-B1*13:01L
IGTVTLKQGEIKDATPSD

SEQ ID NO: 24401 - protein, 14 aa, Severe acute respiratory syndrome coronavirus 2
  REGION 1..14: note = Table B: HLA-DPA1*02:01-B1*13:01L
ASKIITLKKRWQLA

SEQ ID NO: 24402 - protein, 14 aa, Severe acute respiratory syndrome coronavirus 2
  REGION 1..14: note = Table B: HLA-DPA1*02:01-B1*13:01L
FVTVYSHLLLVAAG

SEQ ID NO: 24403 - protein, 10 aa, Severe acute respiratory syndrome coronavirus 2
  REGION 1..10: note = Table B: HLA-DPA1*02:01-B1*13:01L HLA-DQA1*01:03-B1*06:01L
LYDANYFLCW

SEQ ID NO: 24404 - protein, 16 aa, Severe acute respiratory syndrome coronavirus 2
  REGION 1..16: note = Table B: HLA-DPA1*02:01-B1*13:01L
YTEKWESGVKDCVVLH

SEQ ID NO: 24405 - protein, 10 aa, Severe acute respiratory syndrome coronavirus 2
  REGION 1..10: note = Table B: HLA-DPA1*02:01-B1*13:01L HLA-DQA1*01:03-B1*06:01L HLA-DRB1*15:03L
RFLYIIKLIF

SEQ ID NO: 24406 - protein, 10 aa, Severe acute respiratory syndrome coronavirus 2
  REGION 1..10: note = Table B: HLA-DPA1*02:01-B1*13:01L HLA-DQA1*01:03-B1*06:01L
LYIIKLIFLW

SEQ ID NO: 24407 - protein, 15 aa, Severe acute respiratory syndrome coronavirus 2
  REGION 1..15: note = Table B: HLA-DPA1*02:01-B1*13:01L
LFARTRSMWSFNPET

SEQ ID NO: 24408 - protein, 17 aa, Severe acute respiratory syndrome coronavirus 2
  REGION 1..17: note = Table B: HLA-DPA1*02:01-B1*13:01L
IAGHHLGRCDIKDLPKE

SEQ ID NO: 24409 - protein, 15 aa, Severe acute respiratory syndrome coronavirus 2
  REGION 1..15: note = Table B: HLA-DPA1*02:01-B1*13:01L HLA-DRB1*04:08L
IKDLPKEITVATSRT

SEQ ID NO: 24410 - protein, 15 aa, Severe acute respiratory syndrome coronavirus 2
  REGION 1..15: note = Table B: HLA-DPA1*02:01-B1*13:01L
ATSRTLSYYKLGASQ

SEQ ID NO: 24411 - protein, 14 aa, Severe acute respiratory syndrome coronavirus 2
  REGION 1..14: note = Table B: HLA-DPA1*02:01-B1*13:01L
RTLSYYKLGASQRV

SEQ ID NO: 24412 - protein, 16 aa, Severe acute respiratory syndrome coronavirus 2
  REGION 1..16: note = Table B: HLA-DPA1*02:01-B1*13:01L
TQFAFACPDGVKHVYQ

SEQ ID NO: 24413 - protein, 16 aa, Severe acute respiratory syndrome coronavirus 2
  REGION 1..16: note = Table B: HLA-DPA1*02:01-B1*13:01L
YQLRARSVSPKLFIRQ

SEQ ID NO: 24414 - protein, 16 aa, Severe acute respiratory syndrome coronavirus 2
  REGION 1..16: note = Table B: HLA-DPA1*02:01-B1*13:01L
LRARSVSPKLFIRQEE

SEQ ID NO: 24415 - protein, 15 aa, Severe acute respiratory syndrome coronavirus 2
  REGION 1..15: note = Table B: HLA-DPA1*02:01-B1*13:01L HLA-DRB1*15:03L
GSLVVRCSFYEDFLE

SEQ ID NO: 24416 - protein, 14 aa, Severe acute respiratory syndrome coronavirus 2
  REGION 1..14: note = Table B: HLA-DPA1*02:01-B1*13:01L
VVRCSFYEDFLEYH

SEQ ID NO: 24417 - protein, 18 aa, Severe acute respiratory syndrome coronavirus 2
  REGION 1..18: note = Table B: HLA-DPA1*02:01-B1*13:01L
FPRGQGVPINTNSSPDDQ

SEQ ID NO: 24418 - protein, 13 aa, Severe acute respiratory syndrome coronavirus 2
  REGION 1..13: note = Table B: HLA-DPA1*02:01-B1*13:01L
GDGKMKDLSPRWY

SEQ ID NO: 24419 - protein, 11 aa, Severe acute respiratory syndrome coronavirus 2
  REGION 1..11: note = Table B: HLA-DPA1*02:01-B1*13:01L HLA-DQA1*01:03-B1*06:01L HLA-DQA1*02:01-B1*03:03L
PYGANKDGIIW

SEQ ID NO: 24420 - protein, 14 aa, Severe acute respiratory syndrome coronavirus 2
  REGION 1..14: note = Table B: HLA-DPA1*02:01-B1*13:01L HLA-DPA1*01:03-B1*104:01L HLA-DPA1*01:02-B1*04:01L
NKDGIIWVATEGAL

SEQ ID NO: 24421 - protein, 14 aa, Severe acute respiratory syndrome coronavirus 2
  REGION 1..14: note = Table B: HLA-DPA1*02:01-B1*13:01L HLA-DPA1*01:03-B1*104:01L
IWVATEGALNTPKD

SEQ ID NO: 24422 - protein, 14 aa, Severe acute respiratory syndrome coronavirus 2
  REGION 1..14: note = Table B: HLA-DPA1*02:01-B1*13:01L HLA-DRB1*07:01L
IVLQLPQGTTLPKG

SEQ ID NO: 24423 - protein, 19 aa, Severe acute respiratory syndrome coronavirus 2
  REGION 1..19: note = Table B: HLA-DPA1*02:01-B1*13:01L
PGSSRGTSPARMAGNGGDA

SEQ ID NO: 24424 - protein, 15 aa, Severe acute respiratory syndrome coronavirus 2
  REGION 1..15: note = Table B: HLA-DPA1*02:01-B1*13:01L
DQELIRQGTDYKHWP

SEQ ID NO: 24425 - protein, 14 aa, Severe acute respiratory syndrome coronavirus 2
  REGION 1..14: note = Table B: HLA-DPA1*02:01-B1*13:01L HLA-DPA1*03:01-B1*105:01L HLA-DQA1*01:03-B1*06:01L
IRQGTDYKHWPQIA

SEQ ID NO: 24426 - protein, 13 aa, Severe acute respiratory syndrome coronavirus 2
  REGION 1..13: note = Table B: HLA-DPA1*02:01-B1*13:01L HLA-DRB1*16:01L HLA-DQA1*01:03-B1*06:01L
DDKDPNFKDQVIL

SEQ ID NO: 24427 - protein, 16 aa, Severe acute respiratory syndrome coronavirus 2
  REGION 1..16: note = Table B: HLA-DPA1*02:01-B1*13:01L
KKKKADETQALPQRQK

SEQ ID NO: 24428 - protein, 11 aa, Severe acute respiratory syndrome coronavirus 2
  REGION 1..11: note = Table B: HLA-DPA1*02:01-B1*13:01L HLA-DQA1*01:03-B1*06:01L HLA-DQA1*02:01-B1*03:03L HLA-DRB1*15:03L
TLLPAADLDDF

SEQ ID NO: 24429 - protein, 10 aa, Severe acute respiratory syndrome coronavirus 2
  REGION 1..10: note = Table B: HLA-DPA1*02:01-B1*13:01L
INVFAFPFTI

SEQ ID NO: 24430 - protein, 15 aa, Severe acute respiratory syndrome coronavirus 2
  REGION 1..15: note = Table B: HLA-DPA1*03:01-B1*105:01L
VPGFNEKTHVQLSLP

SEQ ID NO: 24431 - protein, 13 aa, Severe acute respiratory syndrome coronavirus 2
  REGION 1..13: note = Table B: HLA-DPA1*03:01-B1*105:01L
VMVELVAELEGIQ

SEQ ID NO: 24432 - protein, 15 aa, Severe acute respiratory syndrome coronavirus 2
  REGION 1..15: note = Table B: HLA-DPA1*03:01-B1*105:01L
ENWNTKHSSGVTREL

SEQ ID NO: 24433 - protein, 15 aa, Severe acute respiratory syndrome coronavirus 2
  REGION 1..15: note = Table B: HLA-DPA1*03:01-B1*105:01L
TRYVDNNFCGPDGYP

SEQ ID NO: 24434 - protein, 13 aa, Severe acute respiratory syndrome coronavirus 2
  REGION 1..13: note = Table B: HLA-DPA1*03:01-B1*105:01L HLA-DQA1*05:05-B1*03:01L HLA-DQA1*02:01-B1*03:03L
AGKASCTLSEQLD

SEQ ID NO: 24435 - protein, 15 aa, Severe acute respiratory syndrome coronavirus 2
  REGION 1..15: note = Table B: HLA-DPA1*03:01-B1*105:01L HLA-DQA1*01:03-B1*06:01L
SPNECNQMCLSTLMK

SEQ ID NO: 24436 - protein, 13 aa, Severe acute respiratory syndrome coronavirus 2
  REGION 1..13: note = Table B: HLA-DPA1*03:01-B1*105:01L HLA-DQA1*05:05-B1*03:01L HLA-DQA1*02:01-B1*03:03L
KEGATTCGYLPQN

SEQ ID NO: 24437 - protein, 15 aa, Severe acute respiratory syndrome coronavirus 2
  REGION 1..15: note = Table B: HLA-DPA1*03:01-B1*105:01L HLA-DQA1*05:05-B1*03:01L
EGATTCGYLPQNAVV

SEQ ID NO: 24438 - protein, 15 aa, Severe acute respiratory syndrome coronavirus 2
  REGION 1..15: note = Table B: HLA-DPA1*03:01-B1*105:01L
NAVVKIYCPACHNSE

SEQ ID NO: 24439 - protein, 14 aa, Severe acute respiratory syndrome coronavirus 2
  REGION 1..14: note = Table B: HLA-DPA1*03:01-B1*105:01L
GRTIAFGGCVFSYV

SEQ ID NO: 24440 - protein, 13 aa, Severe acute respiratory syndrome coronavirus 2
  REGION 1..13: note = Table B: HLA-DPA1*03:01-B1*105:01L HLA-DQA1*01:03-B1*06:01L
SEGLNDNLLEILQ

SEQ ID NO: 24441 - protein, 12 aa, Severe acute respiratory syndrome coronavirus 2
  REGION 1..12: note = Table B: HLA-DPA1*03:01-B1*105:01L
GLNDNLLEILQK

SEQ ID NO: 24442 - protein, 10 aa, Severe acute respiratory syndrome coronavirus 2
  REGION 1..10: note = Table B: HLA-DPA1*03:01-B1*105:01L
EILQKEKVNI

SEQ ID NO: 24443 - protein, 15 aa, Severe acute respiratory syndrome coronavirus 2
  REGION 1..15: note = Table B: HLA-DPA1*03:01-B1*105:01L
YKAFKQIVESCGNFK

SEQ ID NO: 24444 - protein, 13 aa, Severe acute respiratory syndrome coronavirus 2
  REGION 1..13: note = Table B: HLA-DPA1*03:01-B1*105:01L HLA-DQA1*02:01-B1*03:03L
IVESCGNFKVTKG

SEQ ID NO: 24445 - protein, 13 aa, Severe acute respiratory syndrome coronavirus 2
  REGION 1..13: note = Table B: HLA-DPA1*03:01-B1*105:01L
QKAAITILDGISQ

SEQ ID NO: 24446 - protein, 13 aa, Severe acute respiratory syndrome coronavirus 2
  REGION 1..13: note = Table B: HLA-DPA1*03:01-B1*105:01L
TNNLVVMAYITGG

SEQ ID NO: 24447 - protein, 14 aa, Severe acute respiratory syndrome coronavirus 2
  REGION 1..14: note = Table B: HLA-DPA1*03:01-B1*105:01L HLA-DQA1*05:05-B1*03:01L HLA-DQA1*01:03-B1*06:01L
NNLVVMAYITGGVV

SEQ ID NO: 24448 - protein, 12 aa, Severe acute respiratory syndrome coronavirus 2
  REGION 1..12: note = Table B: HLA-DPA1*03:01-B1*105:01L
VQLTSQWLTNIF

SEQ ID NO: 24449 - protein, 11 aa, Severe acute respiratory syndrome coronavirus 2
  REGION 1..11: note = Table B: HLA-DPA1*03:01-B1*105:01L
LTSQWLTNIFG

SEQ ID NO: 24450 - protein, 13 aa, Severe acute respiratory syndrome coronavirus 2
  REGION 1..13: note = Table B: HLA-DPA1*03:01-B1*105:01L
WEIVKFISTCACE

SEQ ID NO: 24451 - protein, 14 aa, Severe acute respiratory syndrome coronavirus 2
  REGION 1..14: note = Table B: HLA-DPA1*03:01-B1*105:01L HLA-DQA1*05:05-B1*03:01L
LALCADSIIIGGAK

SEQ ID NO: 24452 - protein, 13 aa, Severe acute respiratory syndrome coronavirus 2
  REGION 1..13: note = Table B: HLA-DPA1*03:01-B1*105:01L
GAKLKALNLGETF

SEQ ID NO: 24453 - protein, 11 aa, Severe acute respiratory syndrome coronavirus 2
  REGION 1..11: note = Table B: HLA-DPA1*03:01-B1*105:01L HLA-DPA1*01:02-B1*04:01L HLA-DQA1*01:03-B1*06:01L
DTEKYCALAPN

SEQ ID NO: 24454 - protein, 14 aa, Severe acute respiratory syndrome coronavirus 2
  REGION 1..14: note = Table B: HLA-DPA1*03:01-B1*105:01L
MVTNNTFTLKGGAP

SEQ ID NO: 24455 - protein, 12 aa, Severe acute respiratory syndrome coronavirus 2
  REGION 1..12: note = Table B: HLA-DPA1*03:01-B1*105:01L
FTLKGGAPTKVT

SEQ ID NO: 24456 - protein, 14 aa, Severe acute respiratory syndrome coronavirus 2
  REGION 1..14: note = Table B: HLA-DPA1*03:01-B1*105:01L
VLNEKCSAYTVELG

SEQ ID NO: 24457 - protein, 11 aa, Severe acute respiratory syndrome coronavirus 2
  REGION 1..11: note = Table B: HLA-DPA1*03:01-B1*105:01L HLA-DQA1*01:03-B1*06:01L
TVELGTEVNEF

SEQ ID NO: 24458 - protein, 14 aa, Severe acute respiratory syndrome coronavirus 2
  REGION 1..14: note = Table B: HLA-DPA1*03:01-B1*105:01L
LGTEVNEFACVVAD

SEQ ID NO: 24459 - protein, 12 aa, Severe acute respiratory syndrome coronavirus 2
  REGION 1..12: note = Table B: HLA-DPA1*03:01-B1*105:01L
VNEFACVVADAV

SEQ ID NO: 24460 - protein, 11 aa, Severe acute respiratory syndrome coronavirus 2
  REGION 1..11: note = Table B: HLA-DPA1*03:01-B1*105:01L HLA-DRB1*15:03L
IDLDEWSMATY

SEQ ID NO: 24461 - protein, 14 aa, Severe acute respiratory syndrome coronavirus 2
  REGION 1..14: note = Table B: HLA-DPA1*03:01-B1*105:01L
EWSMATYYLFDESG

SEQ ID NO: 24462 - protein, 14 aa, Severe acute respiratory syndrome coronavirus 2
  REGION 1..14: note = Table B: HLA-DPA1*03:01-B1*105:01L
KLASHMYCSFYPPD

SEQ ID NO: 24463 - protein, 14 aa, Severe acute respiratory syndrome coronavirus 2
  REGION 1..14: note = Table B: HLA-DPA1*03:01-B1*105:01L
LASHMYCSFYPPDE

SEQ ID NO: 24464 - protein, 14 aa, Severe acute respiratory syndrome coronavirus 2
  REGION 1..14: note = Table B: HLA-DPA1*03:01-B1*105:01L
ASHMYCSFYPPDED

SEQ ID NO: 24465 - protein, 14 aa, Severe acute respiratory syndrome coronavirus 2
  REGION 1..14: note = Table B: HLA-DPA1*03:01-B1*105:01L HLA-DQA1*01:03-B1*06:01L
SHMYCSFYPPDEDE

SEQ ID NO: 24466 - protein, 15 aa, Severe acute respiratory syndrome coronavirus 2
  REGION 1..15: note = Table B: HLA-DPA1*03:01-B1*105:01L HLA-DQA1*01:03-B1*06:01L
EEGDCEEEEFEPSTQ

SEQ ID NO: 24467 - protein, 15 aa, Severe acute respiratory syndrome coronavirus 2
  REGION 1..15: note = Table B: HLA-DPA1*03:01-B1*105:01L
EGDCEEEEFEPSTQY

SEQ ID NO: 24468 - protein, 14 aa, Severe acute respiratory syndrome coronavirus 2
  REGION 1..14: note = Table B: HLA-DPA1*03:01-B1*105:01L HLA-DQA1*01:03-B1*06:01L
DCEEEEFEPSTQYE

SEQ ID NO: 24469 - protein, 17 aa, Severe acute respiratory syndrome coronavirus 2
  REGION 1..17: note = Table B: HLA-DPA1*03:01-B1*105:01L HLA-DRB1*15:03L
QPEEEQEEDWLDDDSQQ

SEQ ID NO: 24470 - protein, 15 aa, Severe acute respiratory syndrome coronavirus 2
  REGION 1..15: note = Table B: HLA-DPA1*03:01-B1*105:01L HLA-DRB1*16:01L HLA-DRB1*04:08L
DDSQQTVGQQDGSED

SEQ ID NO: 24471 - protein, 14 aa, Severe acute respiratory syndrome coronavirus 2
  REGION 1..14: note = Table B: HLA-DPA1*03:01-B1*105:01L HLA-DQA1*05:05-B1*03:01L
QTTTIQTIVEVQPQ

SEQ ID NO: 24472 - protein, 12 aa, Severe acute respiratory syndrome coronavirus 2
  REGION 1..12: note = Table B: HLA-DPA1*03:01-B1*105:01L HLA-DQA1*05:05-B1*03:01L
EMELTPVVQTIE

SEQ ID NO: 24473 - protein, 10 aa, Severe acute respiratory syndrome coronavirus 2
  REGION 1..10: note = Table B: HLA-DPA1*03:01-B1*105:01L HLA-DQA1*03:01-B1*03:02L HLA-DPA1*01:02-B1*04:01L HLA-DQA1*01:03-B1*06:01L HLA-DQA1*02:01-B1*03:03L
FSGYLKLTDN

SEQ ID NO: 24474 - protein, 16 aa, Severe acute respiratory syndrome coronavirus 2
  REGION 1..16: note = Table B: HLA-DPA1*03:01-B1*105:01L
DIVEEAKKVKPTVVVN

SEQ ID NO: 24475 - protein, 14 aa, Severe acute respiratory syndrome coronavirus 2
  REGION 1..14: note = Table B: HLA-DPA1*03:01-B1*105:01L
NKATNNAMQVESDD

SEQ ID NO: 24476 - protein, 14 aa, Severe acute respiratory syndrome coronavirus 2
  REGION 1..14: note = Table B: HLA-DPA1*03:01-B1*105:01L
MQVESDDYIATNGP

SEQ ID NO: 24477 - protein, 10 aa, Severe acute respiratory syndrome coronavirus 2
  REGION 1..10: note = Table B: HLA-DPA1*03:01-B1*105:01L HLA-DPA1*01:02-B1*04:01L
LLKSAYENFN

SEQ ID NO: 24478 - protein, 13 aa, Severe acute respiratory syndrome coronavirus 2
  REGION 1..13: note = Table B: HLA-DPA1*03:01-B1*105:01L
DTVRTNVYLAVFD

SEQ ID NO: 24479 - protein, 10 aa, Severe acute respiratory syndrome coronavirus 2
  REGION 1..10: note = Table B: HLA-DPA1*03:01-B1*105:01L HLA-DQA1*03:01-B1*03:02L HLA-DPA1*01:02-B1*04:01L
KLVSSFLEMK

SEQ ID NO: 24480 - protein, 14 aa, Severe acute respiratory syndrome coronavirus 2
  REGION 1..14: note = Table B: HLA-DPA1*03:01-B1*105:01L
KIKACVEEVTTTLE

SEQ ID NO: 24481 - protein, 12 aa, Severe acute respiratory syndrome coronavirus 2
  REGION 1..12: note = Table B: HLA-DPA1*03:01-B1*105:01L HLA-DRB1*15:03L
LLYIDINGNLHP

SEQ ID NO: 24482 - protein, 14 aa, Severe acute respiratory syndrome coronavirus 2
  REGION 1..14: note = Table B: HLA-DPA1*03:01-B1*105:01L HLA-DRB1*16:01L
VSDIDITFLKKDAP

SEQ ID NO: 24483 - protein, 18 aa, Severe acute respiratory syndrome coronavirus 2
  REGION 1..18: note = Table B: HLA-DPA1*03:01-B1*105:01L
EETRKLMPVCVETKAIVS

SEQ ID NO: 24484 - protein, 15 aa, Severe acute respiratory syndrome coronavirus 2
  REGION 1..15: note = Table B: HLA-DPA1*03:01-B1*105:01L
MPVCVETKAIVSTIQ

SEQ ID NO: 24485 - protein, 12 aa, Severe acute respiratory syndrome coronavirus 2
  REGION 1..12: note = Table B: HLA-DPA1*03:01-B1*105:01L
KYKGIKIQEGVV

SEQ ID NO: 24486 - protein, 12 aa, Severe acute respiratory syndrome coronavirus 2
  REGION 1..12: note = Table B: HLA-DPA1*03:01-B1*105:01L
TLVTMPLGYVTH

SEQ ID NO: 24487 - protein, 13 aa, Severe acute respiratory syndrome coronavirus 2
  REGION 1..13: note = Table B: HLA-DPA1*03:01-B1*105:01L
TFDNLKTLLSLRE

SEQ ID NO: 24488 - protein, 16 aa, Severe acute respiratory syndrome coronavirus 2
  REGION 1..16: note = Table B: HLA-DPA1*03:01-B1*105:01L
LLSLREVRTIKVFTTV

SEQ ID NO: 24489 - protein, 11 aa, Severe acute respiratory syndrome coronavirus 2
  REGION 1..11: note = Table B: HLA-DPA1*03:01-B1*105:01L HLA-DRB1*15:03L
TVDNINLHTQV

SEQ ID NO: 24490 - protein, 14 aa, Severe acute respiratory syndrome coronavirus 2
  REGION 1..14: note = Table B: HLA-DPA1*03:01-B1*105:01L HLA-DQA1*05:05-B1*03:01L HLA-DQA1*01:03-B1*06:01L
IKWADNNCYLATAL

SEQ ID NO: 24491 - protein, 11 aa, Severe acute respiratory syndrome coronavirus 2
  REGION 1..11: note = Table B: HLA-DPA1*03:01-B1*105:01L
VGELGDVRETM

SEQ ID NO: 24492 - protein, 10 aa, Severe acute respiratory syndrome coronavirus 2
  REGION 1..10: note = Table B: HLA-DPA1*03:01-B1*105:01L HLA-DPA1*01:02-B1*04:01L HLA-DQA1*01:03-B1*06:01L
FQHANLDSCK

SEQ ID NO: 24493 - protein, 10 aa, Severe acute respiratory syndrome coronavirus 2
  REGION 1..10: note = Table B: HLA-DPA1*03:01-B1*105:01L HLA-DPA1*01:02-B1*04:01L HLA-DQA1*01:03-B1*06:01L HLA-DQA1*02:01-B1*03:03L
MGTLSYEQFK

SEQ ID NO: 24494 - protein, 15 aa, Severe acute respiratory syndrome coronavirus 2
  REGION 1..15: note = Table B: HLA-DPA1*03:01-B1*105:01L
ELKHGTFTCASEYTG

SEQ ID NO: 24495 - protein, 13 aa, Severe acute respiratory syndrome coronavirus 2
  REGION 1..13: note = Table B: HLA-DPA1*03:01-B1*105:01L HLA-DQA1*05:05-B1*03:01L
TFTCASEYTGNYQ

SEQ ID NO: 24496 - protein, 12 aa, Severe acute respiratory syndrome coronavirus 2
  REGION 1..12: note = Table B: HLA-DPA1*03:01-B1*105:01L
ASFDNFKFVCDN

SEQ ID NO: 24497 - protein, 17 aa, Severe acute respiratory syndrome coronavirus 2
  REGION 1..17: note = Table B: HLA-DPA1*03:01-B1*105:01L
KPNTWCIRCLWSTKPVE

SEQ ID NO: 24498 - protein, 15 aa, Severe acute respiratory syndrome coronavirus 2
  REGION 1..15: note = Table B: HLA-DPA1*03:01-B1*105:01L HLA-DQA1*03:01-B1*03:02L HLA-DQA1*05:05-B1*03:01L HLA-DQA1*01:03-B1*06:01L HLA-DQA1*02:01-B1*03:03L
DAQGMDNLACEDLKP

SEQ ID NO: 24499 - protein, 10 aa, Severe acute respiratory syndrome coronavirus 2
  REGION 1..10: note = Table B: HLA-DPA1*03:01-B1*105:01L HLA-DPA1*01:02-B1*04:01L HLA-DQA1*01:03-B1*06:01L
LACEDLKPVS

SEQ ID NO: 24500 - protein, 12 aa, Severe acute respiratory syndrome coronavirus 2
  REGION 1..12: note = Table B: HLA-DPA1*03:01-B1*105:01L
GHTDLMAAYVDN

SEQ ID NO: 24501 - protein, 12 aa, Severe acute respiratory syndrome coronavirus 2
  REGION 1..12: note = Table B: HLA-DPA1*03:01-B1*105:01L
LLQLCTFTRSTN

SEQ ID NO: 24502 - protein, 13 aa, Severe acute respiratory syndrome coronavirus 2
  REGION 1..13: note = Table B: HLA-DPA1*03:01-B1*105:01L HLA-DQA1*01:03-B1*06:01L
MPSYCTGYREGYL

SEQ ID NO: 24503 - protein, 11 aa, Severe acute respiratory syndrome coronavirus 2
  REGION 1..11: note = Table B: HLA-DPA1*03:01-B1*105:01L HLA-DQA1*03:01-B1*03:02L HLA-DPA1*01:02-B1*04:01L HLA-DQA1*01:03-B1*06:01L HLA-DQA1*02:01-B1*03:03L
GYREGYLNSTN

SEQ ID NO: 24504 - protein, 14 aa, Severe acute respiratory syndrome coronavirus 2
  REGION 1..14: note = Table B: HLA-DPA1*03:01-B1*105:01L
TYPSLETIQITISS

SEQ ID NO: 24505 - protein, 13 aa, Severe acute respiratory syndrome coronavirus 2
  REGION 1..13: note = Table B: HLA-DPA1*03:01-B1*105:01L
RFFYVLGLAAIMQ

SEQ ID NO: 24506 - protein, 10 aa, Severe acute respiratory syndrome coronavirus 2
  REGION 1..10: note = Table B: HLA-DPA1*03:01-B1*105:01L HLA-DPA1*01:02-B1*04:01L
FFASFYYVWK

SEQ ID NO: 24507 - protein, 10 aa, Severe acute respiratory syndrome coronavirus 2
  REGION 1..10: note = Table B: HLA-DPA1*03:01-B1*105:01L HLA-DQA1*03:01-B1*03:02L HLA-DQA1*05:05-B1*03:01L HLA-DQA1*01:03-B1*06:01L HLA-DQA1*02:01-B1*03:03L
VLSTFISAAR

SEQ ID NO: 24508 - protein, 14 aa, Severe acute respiratory syndrome coronavirus 2
  REGION 1..14: note = Table B: HLA-DPA1*03:01-B1*105:01L
DVETKDVVECLKLS

SEQ ID NO: 24509 - protein, 12 aa, Severe acute respiratory syndrome coronavirus 2
  REGION 1..12: note = Table B: HLA-DPA1*03:01-B1*105:01L
MLTYNKVENMTP

SEQ ID NO: 24510 - protein, 12 aa, Severe acute respiratory syndrome coronavirus 2
  REGION 1..12: note = Table B: HLA-DPA1*03:01-B1*105:01L HLA-DQA1*05:05-B1*03:01L
VLAAECTIFKDA

SEQ ID NO: 24511 - protein, 12 aa, Severe acute respiratory syndrome coronavirus 2
  REGION 1..12: note = Table B: HLA-DPA1*03:01-B1*105:01L HLA-DQA1*03:01-B1*03:02L HLA-DQA1*05:05-B1*03:01L HLA-DQA1*02:01-B1*03:03L
AAECTIFKDASG

SEQ ID NO: 24512 - protein, 11 aa, Severe acute respiratory syndrome coronavirus 2
  REGION 1..11: note = Table B: HLA-DPA1*03:01-B1*105:01L HLA-DQA1*05:05-B1*03:01L HLA-DQA1*01:03-B1*06:01L
FKDASGKPVPY

SEQ ID NO: 24513 - protein, 14 aa, Severe acute respiratory syndrome coronavirus 2
  REGION 1..14: note = Table B: HLA-DPA1*03:01-B1*105:01L HLA-DQA1*05:05-B1*03:01L
PYCYDTNVLEGSVA

SEQ ID NO: 24514 - protein, 12 aa, Severe acute respiratory syndrome coronavirus 2
  REGION 1..12: note = Table B: HLA-DPA1*03:01-B1*105:01L HLA-DRB1*04:08L
VLEGSVAYESLR

SEQ ID NO: 24515 - protein, 12 aa, Severe acute respiratory syndrome coronavirus 2
  REGION 1..12: note = Table B: HLA-DPA1*03:01-B1*105:01L
LEGSVAYESLRP

SEQ ID NO: 24516 - protein, 12 aa, Severe acute respiratory syndrome coronavirus 2
  REGION 1..12: note = Table B: HLA-DPA1*03:01-B1*105:01L HLA-DQA1*05:05-B1*03:01L
STSGRWVLNNDY

SEQ ID NO: 24517 - protein, 15 aa, Severe acute respiratory syndrome coronavirus 2
  REGION 1..15: note = Table B: HLA-DPA1*03:01-B1*105:01L
PGVFCGVDAVNLLTN

SEQ ID NO: 24518 - protein, 15 aa, Severe acute respiratory syndrome coronavirus 2
  REGION 1..15: note = Table B: HLA-DPA1*03:01-B1*105:01L
LAYYFMRFRRAFGEY

SEQ ID NO: 24519 - protein, 16 aa, Severe acute respiratory syndrome coronavirus 2
  REGION 1..16: note = Table B: HLA-DPA1*03:01-B1*105:01L
FMRFRRAFGEYSHVVA

SEQ ID NO: 24520 - protein, 12 aa, Severe acute respiratory syndrome coronavirus 2
  REGION 1..12: note = Table B: HLA-DPA1*03:01-B1*105:01L
AFGEYSHVVAFN

SEQ ID NO: 24521 - protein, 12 aa, Severe acute respiratory syndrome coronavirus 2
  REGION 1..12: note = Table B: HLA-DPA1*03:01-B1*105:01L
MSFTVLCLTPVY

SEQ ID NO: 24522 - protein, 15 aa, Severe acute respiratory syndrome coronavirus 2
  REGION 1..15: note = Table B: HLA-DPA1*03:01-B1*105:01L
VIYLYLTFYLTNDVS

SEQ ID NO: 24523 - protein, 10 aa, Severe acute respiratory syndrome coronavirus 2
  REGION 1..10: note = Table B: HLA-DPA1*03:01-B1*105:01L HLA-DPA1*01:02-B1*04:01L
FNGVSFSTFE

SEQ ID NO: 24524 - protein, 13 aa, Severe acute respiratory syndrome coronavirus 2
  REGION 1..13: note = Table B: HLA-DPA1*03:01-B1*105:01L
FEEAALCTFLLNK

SEQ ID NO: 24525 - protein, 11 aa, Severe acute respiratory syndrome coronavirus 2
  REGION 1..11: note = Table B: HLA-DPA1*03:01-B1*105:01L
TFLLNKEMYLK

SEQ ID NO: 24526 - protein, 11 aa, Severe acute respiratory syndrome coronavirus 2
  REGION 1..11: note = Table B: HLA-DPA1*03:01-B1*105:01L
FLLNKEMYLKL

SEQ ID NO: 24527 - protein, 10 aa, Severe acute respiratory syndrome coronavirus 2
  REGION 1..10: note = Table B: HLA-DPA1*03:01-B1*105:01L HLA-DPA1*01:02-B1*04:01L HLA-DRB1*16:01L
LNKEMYLKLR

SEQ ID NO: 24528 - protein, 10 aa, Severe acute respiratory syndrome coronavirus 2
  REGION 1..10: note = Table B: HLA-DPA1*03:01-B1*105:01L HLA-DPA1*01:02-B1*04:01L
LRSDVLLPLT

SEQ ID NO: 24529 - protein, 12 aa, Severe acute respiratory syndrome coronavirus 2
  REGION 1..12: note = Table B: HLA-DPA1*03:01-B1*105:01L HLA-DQA1*03:01-B1*03:02L HLA-DQA1*01:03-B1*06:01L
RSDVLLPLTQYN

SEQ ID NO: 24530 - protein, 14 aa, Severe acute respiratory syndrome coronavirus 2
  REGION 1..14: note = Table B: HLA-DPA1*03:01-B1*105:01L
SYREAACCHLAKAL

SEQ ID NO: 24531 - protein, 14 aa, Severe acute respiratory syndrome coronavirus 2
  REGION 1..14: note = Table B: HLA-DPA1*03:01-B1*105:01L HLA-DQA1*05:05-B1*03:01L HLA-DQA1*02:01-B1*03:03L
YREAACCHLAKALN

SEQ ID NO: 24532 - protein, 14 aa, Severe acute respiratory syndrome coronavirus 2
  REGION 1..14: note = Table B: HLA-DPA1*03:01-B1*105:01L
FPSGKVEGCMVQVT

SEQ ID NO: 24533 - protein, 15 aa, Severe acute respiratory syndrome coronavirus 2
  REGION 1..15: note = Table B: HLA-DPA1*03:01-B1*105:01L
GKVEGCMVQVTCGTT

SEQ ID NO: 24534 - protein, 13 aa, Severe acute respiratory syndrome coronavirus 2
  REGION 1..13: note = Table B: HLA-DPA1*03:01-B1*105:01L HLA-DRB1*15:03L
TTLNGLWLDDVVY

SEQ ID NO: 24535 - protein, 11 aa, Severe acute respiratory syndrome coronavirus 2
  REGION 1..11: note = Table B: HLA-DPA1*03:01-B1*105:01L HLA-DPA1*01:02-B1*04:01L
LWLDDVVYCPR

SEQ ID NO: 24536 - protein, 15 aa, Severe acute respiratory syndrome coronavirus 2
  REGION 1..15: note = Table B: HLA-DPA1*03:01-B1*105:01L
HVICTSEDMLNPNYE

SEQ ID NO: 24537 - protein, 13 aa, Severe acute respiratory syndrome coronavirus 2
  REGION 1..13: note = Table B: HLA-DPA1*03:01-B1*105:01L
LNPNYEDLLIRKS

SEQ ID NO: 24538 - protein, 15 aa, Severe acute respiratory syndrome coronavirus 2
  REGION 1..15: note = Table B: HLA-DPA1*03:01-B1*105:01L
IQPGQTFSVLACYNG

SEQ ID NO: 24539 - protein, 13 aa, Severe acute respiratory syndrome coronavirus 2
  REGION 1..13: note = Table B: HLA-DPA1*03:01-B1*105:01L
LACYNGSPSGVYQ

SEQ ID NO: 24540 - protein, 11 aa, Severe acute respiratory syndrome coronavirus 2
  REGION 1..11: note = Table B: HLA-DPA1*03:01-B1*105:01L HLA-DPA1*01:02-B1*04:01L
DYDCVSFCYMH

SEQ ID NO: 24541 - protein, 13 aa, Severe acute respiratory syndrome coronavirus 2
  REGION 1..13: note = Table B: HLA-DPA1*03:01-B1*105:01L
YDCVSFCYMHHME

SEQ ID NO: 24542 - protein, 13 aa, Severe acute respiratory syndrome coronavirus 2
  REGION 1..13: note = Table B: HLA-DPA1*03:01-B1*105:01L HLA-DQA1*01:03-B1*06:01L
AGTDLEGNFYGPF

SEQ ID NO: 24543 - protein, 14 aa, Severe acute respiratory syndrome coronavirus 2
  REGION 1..14: note = Table B: HLA-DPA1*03:01-B1*105:01L
RQTAQAAGTDTTIT

SEQ ID NO: 24544 - protein, 12 aa, Severe acute respiratory syndrome coronavirus 2
  REGION 1..12: note = Table B: HLA-DPA1*03:01-B1*105:01L
DFNLVAMKYNYE

SEQ ID NO: 24545 - protein, 14 aa, Severe acute respiratory syndrome coronavirus 2
  REGION 1..14: note = Table B: HLA-DPA1*03:01-B1*105:01L
DILGPLSAQTGIAV

SEQ ID NO: 24546 - protein, 12 aa, Severe acute respiratory syndrome coronavirus 2
  REGION 1..12: note = Table B: HLA-DPA1*03:01-B1*105:01L HLA-DQA1*01:03-B1*06:01L
GIAVLDMCASLK

SEQ ID NO: 24547 - protein, 12 aa, Severe acute respiratory syndrome coronavirus 2
  REGION 1..12: note = Table B: HLA-DPA1*03:01-B1*105:01L
GRTILGSALLED

SEQ ID NO: 24548 - protein, 11 aa, Severe acute respiratory syndrome coronavirus 2
  REGION 1..11: note = Table B: HLA-DPA1*03:01-B1*105:01L
TILGSALLEDE

SEQ ID NO: 24549 - protein, 14 aa, Severe acute respiratory syndrome coronavirus 2
  REGION 1..14: note = Table B: HLA-DPA1*03:01-B1*105:01L
VVRQCSGVTFQSAV

SEQ ID NO: 24550 - protein, 14 aa, Severe acute respiratory syndrome coronavirus 2
  REGION 1..14: note = Table B: HLA-DPA1*03:01-B1*105:01L
VRQCSGVTFQSAVK

SEQ ID NO: 24551 - protein, 13 aa, Severe acute respiratory syndrome coronavirus 2
  REGION 1..13: note = Table B: HLA-DPA1*03:01-B1*105:01L
GTHHWLLLTILTS

SEQ ID NO: 24552 - protein, 12 aa, Severe acute respiratory syndrome coronavirus 2
  REGION 1..12: note = Table B: HLA-DPA1*03:01-B1*105:01L
ILTSLLVLVQST

SEQ ID NO: 24553 - protein, 13 aa, Severe acute respiratory syndrome coronavirus 2
  REGION 1..13: note = Table B: HLA-DPA1*03:01-B1*105:01L
HAFLCLFLLPSLA

SEQ ID NO: 24554 - protein, 12 aa, Severe acute respiratory syndrome coronavirus 2
  REGION 1..12: note = Table B: HLA-DPA1*03:01-B1*105:01L
YFNMVYMPASWV

SEQ ID NO: 24555 - protein, 12 aa, Severe acute respiratory syndrome coronavirus 2
  REGION 1..12: note = Table B: HLA-DPA1*03:01-B1*105:01L HLA-DRB1*15:03L
MRIMTWLDMVDT

SEQ ID NO: 24556 - protein, 14 aa, Severe acute respiratory syndrome coronavirus 2
  REGION 1..14: note = Table B: HLA-DPA1*03:01-B1*105:01L
DTSLSGFKLKDCVM

SEQ ID NO: 24557 - protein, 12 aa, Severe acute respiratory syndrome coronavirus 2
  REGION 1..12: note = Table B: HLA-DPA1*03:01-B1*105:01L
FKLKDCVMYASA

SEQ ID NO: 24558 - protein, 14 aa, Severe acute respiratory syndrome coronavirus 2
  REGION 1..14: note = Table B: HLA-DPA1*03:01-B1*105:01L
KLKDCVMYASAVVL

SEQ ID NO: 24559 - protein, 10 aa, Severe acute respiratory syndrome coronavirus 2
  REGION 1..10: note = Table B: HLA-DPA1*03:01-B1*105:01L HLA-DQA1*03:01-B1*03:02L HLA-DPA1*01:02-B1*04:01L HLA-DQA1*02:01-B1*03:03L
LMNVLTLVYK

SEQ ID NO: 24560 - protein, 13 aa, Severe acute respiratory syndrome coronavirus 2
  REGION 1..13: note = Table B: HLA-DPA1*03:01-B1*105:01L
RGIVFMCVEYCPI

SEQ ID NO: 24561 - protein, 10 aa, Severe acute respiratory syndrome coronavirus 2
  REGION 1..10: note = Table B: HLA-DPA1*03:01-B1*105:01L HLA-DPA1*01:02-B1*04:01L
YFGLFCLLNR

SEQ ID NO: 24562 - protein, 13 aa, Severe acute respiratory syndrome coronavirus 2
  REGION 1..13: note = Table B: HLA-DPA1*03:01-B1*105:01L
RLTLGVYDYLVST

SEQ ID NO: 24563 - protein, 15 aa, Severe acute respiratory syndrome coronavirus 2
  REGION 1..15: note = Table B: HLA-DPA1*03:01-B1*105:01L
SDVKCTSVVLLSVLQ

SEQ ID NO: 24564 - protein, 15 aa, Severe acute respiratory syndrome coronavirus 2
  REGION 1..15: note = Table B: HLA-DPA1*03:01-B1*105:01L
DVKCTSVVLLSVLQQ

SEQ ID NO: 24565 - protein, 12 aa, Severe acute respiratory syndrome coronavirus 2
  REGION 1..12: note = Table B: HLA-DPA1*03:01-B1*105:01L
LQAIASEFSSLP

SEQ ID NO: 24566 - protein, 12 aa, Severe acute respiratory syndrome coronavirus 2
  REGION 1..12: note = Table B: HLA-DPA1*03:01-B1*105:01L HLA-DQA1*01:03-B1*06:01L
IASEFSSLPSYA

SEQ ID NO: 24567 - protein, 13 aa, Severe acute respiratory syndrome coronavirus 2
  REGION 1..13: note = Table B: HLA-DPA1*03:01-B1*105:01L
FATAQEAYEQAVA

SEQ ID NO: 24568 - protein, 16 aa, Severe acute respiratory syndrome coronavirus 2
  REGION 1..16: note = Table B: HLA-DPA1*03:01-B1*105:01L HLA-DPA1*01:03-B1*104:01L
VVLKKLKKSLNVAKSE

SEQ ID NO: 24569 - protein, 16 aa, Severe acute respiratory syndrome coronavirus 2
  REGION 1..16: note = Table B: HLA-DPA1*03:01-B1*105:01L
LKKLKKSLNVAKSEFD

SEQ ID NO: 24570 - protein, 17 aa, Severe acute respiratory syndrome coronavirus 2
  REGION 1..17: note = Table B: HLA-DPA1*03:01-B1*105:01L HLA-DRB1*08:03L
DRDAAMQRKLEKMADQA

SEQ ID NO: 24571 - protein, 14 aa, Severe acute respiratory syndrome coronavirus 2
  REGION 1..14: note = Table B: HLA-DPA1*03:01-B1*105:01L HLA-DRB1*15:03L
ADQAMTQMYKQARS

SEQ ID NO: 24572 - protein, 10 aa, Severe acute respiratory syndrome coronavirus 2
  REGION 1..10: note = Table B: HLA-DPA1*03:01-B1*105:01L HLA-DPA1*01:02-B1*04:01L HLA-DQA1*01:03-B1*06:01L
MQTMLFTMLR

SEQ ID NO: 24573 - protein, 16 aa, Severe acute respiratory syndrome coronavirus 2
  REGION 1..16: note = Table B: HLA-DPA1*03:01-B1*105:01L HLA-DQA1*05:05-B1*03:01L
INNARDGCVPLNIIPL

SEQ ID NO: 24574 - protein, 15 aa, Severe acute respiratory syndrome coronavirus 2
  REGION 1..15: note = Table B: HLA-DPA1*03:01-B1*105:01L
NARDGCVPLNIIPLT

SEQ ID NO: 24575 - protein, 12 aa, Severe acute respiratory syndrome coronavirus 2
  REGION 1..12: note = Table B: HLA-DPA1*03:01-B1*105:01L HLA-DRB1*15:03L
ISMDNSPNLAWP

SEQ ID NO: 24576 - protein, 15 aa, Severe acute respiratory syndrome coronavirus 2
  REGION 1..15: note = Table B: HLA-DPA1*03:01-B1*105:01L
PVALRQMSCAAGTTQ

SEQ ID NO: 24577 - protein, 10 aa, Severe acute respiratory syndrome coronavirus 2
  REGION 1..10: note = Table B: HLA-DPA1*03:01-B1*105:01L
YFIKGLNNLN

SEQ ID NO: 24578 - protein, 13 aa, Severe acute respiratory syndrome coronavirus 2
  REGION 1..13: note = Table B: HLA-DPA1*03:01-B1*105:01L
TVLSFCAFAVDAA

SEQ ID NO: 24579 - protein, 12 aa, Severe acute respiratory syndrome coronavirus 2
  REGION 1..12: note = Table B: HLA-DPA1*03:01-B1*105:01L
VCTVCGMWKGYG

SEQ ID NO: 24580 - protein, 10 aa, Severe acute respiratory syndrome coronavirus 2
  REGION 1..10: note = Table B: HLA-DPA1*03:01-B1*105:01L HLA-DPA1*01:02-B1*04:01L HLA-DQA1*01:03-B1*06:01L HLA-DQA1*02:01-B1*03:03L
AGFAKFLKTN

SEQ ID NO: 24581 - protein, 16 aa, Severe acute respiratory syndrome coronavirus 2
  REGION 1..16: note = Table B: HLA-DPA1*03:01-B1*105:01L
AKFLKTNCCRFQEKDE

SEQ ID NO: 24582 - protein, 18 aa, Severe acute respiratory syndrome coronavirus 2
  REGION 1..18: note = Table B: HLA-DPA1*03:01-B1*105:01L
KFLKTNCCRFQEKDEDDN

SEQ ID NO: 24583 - protein, 12 aa, Severe acute respiratory syndrome coronavirus 2
  REGION 1..12: note = Table B: HLA-DPA1*03:01-B1*105:01L HLA-DRB1*04:08L
IDGDMVPHISRQ

SEQ ID NO: 24584 - protein, 15 aa, Severe acute respiratory syndrome coronavirus 2
  REGION 1..15: note = Table B: HLA-DPA1*03:01-B1*105:01L
VYALRHFDEGNCDTL

SEQ ID NO: 24585 - protein, 17 aa, Severe acute respiratory syndrome coronavirus 2
  REGION 1..17: note = Table B: HLA-DPA1*03:01-B1*105:01L
ALRHFDEGNCDTLKEIL

SEQ ID NO: 24586 - protein, 16 aa, Severe acute respiratory syndrome coronavirus 2
  REGION 1..16: note = Table B: HLA-DPA1*03:01-B1*105:01L
LVTYNCCDDDYFNKKD

SEQ ID NO: 24587 - protein, 12 aa, Severe acute respiratory syndrome coronavirus 2
  REGION 1..12: note = Table B: HLA-DPA1*03:01-B1*105:01L
VENPDILRVYAN

SEQ ID NO: 24588 - protein, 11 aa, Severe acute respiratory syndrome coronavirus 2
  REGION 1..11: note = Table B: HLA-DPA1*03:01-B1*105:01L
LLKTVQFCDAM

SEQ ID NO: 24589 - protein, 13 aa, Severe acute respiratory syndrome coronavirus 2
  REGION 1..13: note = Table B: HLA-DPA1*03:01-B1*105:01L
NWYDFGDFIQTTP

SEQ ID NO: 24590 - protein, 11 aa, Severe acute respiratory syndrome coronavirus 2
  REGION 1..11: note = Table B: HLA-DPA1*03:01-B1*105:01L
SYYSLLMPILT

SEQ ID NO: 24591 - protein, 13 aa, Severe acute respiratory syndrome coronavirus 2
  REGION 1..13: note = Table B: HLA-DPA1*03:01-B1*105:01L
VDTDLTKPYIKWD

SEQ ID NO: 24592 - protein, 12 aa, Severe acute respiratory syndrome coronavirus 2
  REGION 1..12: note = Table B: HLA-DPA1*03:01-B1*105:01L
YIKWDLLKYDFT

SEQ ID NO: 24593 - protein, 12 aa, Severe acute respiratory syndrome coronavirus 2
  REGION 1..12: note = Table B: HLA-DPA1*03:01-B1*105:01L HLA-DPA1*01:02-B1*04:01L
IKWDLLKYDFTE

SEQ ID NO: 24594 - protein, 14 aa, Severe acute respiratory syndrome coronavirus 2
  REGION 1..14: note = Table B: HLA-DPA1*03:01-B1*105:01L
YDFTEERLKLFDRY

SEQ ID NO: 24595 - protein, 14 aa, Severe acute respiratory syndrome coronavirus 2
  REGION 1..14: note = Table B: HLA-DPA1*03:01-B1*105:01L
VVHNQDVNLHSSRL

SEQ ID NO: 24596 - protein, 13 aa, Severe acute respiratory syndrome coronavirus 2
  REGION 1..13: note = Table B: HLA-DPA1*03:01-B1*105:01L
LSFKELLVYAADP

SEQ ID NO: 24597 - protein, 12 aa, Severe acute respiratory syndrome coronavirus 2
  REGION 1..12: note = Table B: HLA-DPA1*03:01-B1*105:01L
AASGNLLLDKRT

SEQ ID NO: 24598 - protein, 14 aa, Severe acute respiratory syndrome coronavirus 2
  REGION 1..14: note = Table B: HLA-DPA1*03:01-B1*105:01L
TTCFSVAALTNNVA

SEQ ID NO: 24599 - protein, 13 aa, Severe acute respiratory syndrome coronavirus 2
  REGION 1..13: note = Table B: HLA-DPA1*03:01-B1*105:01L
AQDGNAAISDYDY

SEQ ID NO: 24600 - protein, 13 aa, Severe acute respiratory syndrome coronavirus 2
  REGION 1..13: note = Table B: HLA-DPA1*03:01-B1*105:01L
DIRQLLFVVEVVD

SEQ ID NO: 24601 - protein, 16 aa, Severe acute respiratory syndrome coronavirus 2
  REGION 1..16: note = Table B: HLA-DPA1*03:01-B1*105:01L
PFNKWGKARLYYDSMS

SEQ ID NO: 24602 - protein, 13 aa, Severe acute respiratory syndrome coronavirus 2
  REGION 1..13: note = Table B: HLA-DPA1*03:01-B1*105:01L HLA-DQA1*05:05-B1*03:01L
ARTVAGVSICSTM

SEQ ID NO: 24603 - protein, 14 aa, Severe acute respiratory syndrome coronavirus 2
  REGION 1..14: note = Table B: HLA-DPA1*03:01-B1*105:01L
RTVAGVSICSTMTN

SEQ ID NO: 24604 - protein, 14 aa, Severe acute respiratory syndrome coronavirus 2
  REGION 1..14: note = Table B: HLA-DPA1*03:01-B1*105:01L
LRIMASLVLARKHT

SEQ ID NO: 24605 - protein, 12 aa, Severe acute respiratory syndrome coronavirus 2
  REGION 1..12: note = Table B: HLA-DPA1*03:01-B1*105:01L HLA-DQA1*05:05-B1*03:01L
LANECAQVLSEM

SEQ ID NO: 24606 - protein, 12 aa, Severe acute respiratory syndrome coronavirus 2
  REGION 1..12: note = Table B: HLA-DPA1*03:01-B1*105:01L
LYYQNNVFMSEA

SEQ ID NO: 24607 - protein, 12 aa, Severe acute respiratory syndrome coronavirus 2
  REGION 1..12: note = Table B: HLA-DPA1*03:01-B1*105:01L
FVSLAIDAYPLT

SEQ ID NO: 24608 - protein, 13 aa, Severe acute respiratory syndrome coronavirus 2
  REGION 1..13: note = Table B: HLA-DPA1*03:01-B1*105:01L
NTSRYWEPEFYEA

SEQ ID NO: 24609 - protein, 12 aa, Severe acute respiratory syndrome coronavirus 2
  REGION 1..12: note = Table B: HLA-DPA1*03:01-B1*105:01L
WEPEFYEAMYTP

SEQ ID NO: 24610 - protein, 12 aa, Severe acute respiratory syndrome coronavirus 2
  REGION 1..12: note = Table B: HLA-DPA1*03:01-B1*105:01L
LSVNPYVCNAPG

SEQ ID NO: 24611 - protein, 12 aa, Severe acute respiratory syndrome coronavirus 2
  REGION 1..12: note = Table B: HLA-DPA1*03:01-B1*105:01L
TFEKGDYGDAVV

SEQ ID NO: 24612 - protein, 12 aa, Severe acute respiratory syndrome coronavirus 2
  REGION 1..12: note = Table B: HLA-DPA1*03:01-B1*105:01L HLA-DRB1*04:08L
YGDAVVYRGTTT

SEQ ID NO: 24613 - protein, 12 aa, Severe acute respiratory syndrome coronavirus 2
  REGION 1..12: note = Table B: HLA-DPA1*03:01-B1*105:01L
HFAIGLALYYPS

SEQ ID NO: 24614 - protein, 12 aa, Severe acute respiratory syndrome coronavirus 2
  REGION 1..12: note = Table B: HLA-DPA1*03:01-B1*105:01L
FAIGLALYYPSA

SEQ ID NO: 24615 - protein, 14 aa, Severe acute respiratory syndrome coronavirus 2
  REGION 1..14: note = Table B: HLA-DPA1*03:01-B1*105:01L
LPIDKCSRIIPARA

SEQ ID NO: 24616 - protein, 16 aa, Severe acute respiratory syndrome coronavirus 2
  REGION 1..16: note = Table B: HLA-DPA1*03:01-B1*105:01L
ARVECFDKFKVNSTLE

SEQ ID NO: 24617 - protein, 13 aa, Severe acute respiratory syndrome coronavirus 2
  REGION 1..13: note = Table B: HLA-DPA1*03:01-B1*105:01L
MKTIGPDMFLGTC

SEQ ID NO: 24618 - protein, 15 aa, Severe acute respiratory syndrome coronavirus 2
  REGION 1..15: note = Table B: HLA-DPA1*03:01-B1*105:01L
PAWRKAVFISPYNSQ

SEQ ID NO: 24619 - protein, 13 aa, Severe acute respiratory syndrome coronavirus 2
  REGION 1..13: note = Table B: HLA-DPA1*03:01-B1*105:01L
SQNAVASKILGLP

SEQ ID NO: 24620 - protein, 11 aa, Severe acute respiratory syndrome coronavirus 2
  REGION 1..11: note = Table B: HLA-DPA1*03:01-B1*105:01L HLA-DPA1*01:02-B1*04:01L HLA-DQA1*02:01-B1*03:03L
VASKILGLPTQ

SEQ ID NO: 24621 - protein, 16 aa, Severe acute respiratory syndrome coronavirus 2
  REGION 1..16: note = Table B: HLA-DPA1*03:01-B1*105:01L HLA-DQA1*03:01-B1*03:02L HLA-DRB1*15:03L
ITRAKVGILCIMSDRD

SEQ ID NO: 24622 - protein, 13 aa, Severe acute respiratory syndrome coronavirus 2
  REGION 1..13: note = Table B: HLA-DPA1*03:01-B1*105:01L HLA-DQA1*05:05-B1*03:01L HLA-DQA1*01:03-B1*06:01L HLA-DQA1*02:01-B1*03:03L
ISMMGFKMNYQVN

SEQ ID NO: 24623 - protein, 12 aa, Severe acute respiratory syndrome coronavirus 2
  REGION 1..12: note = Table B: HLA-DPA1*03:01-B1*105:01L
WIGFDVEGCHAT

SEQ ID NO: 24624 - protein, 12 aa, Severe acute respiratory syndrome coronavirus 2
  REGION 1..12: note = Table B: HLA-DPA1*03:01-B1*105:01L
VQMLSDTLKNLS

SEQ ID NO: 24625 - protein, 14 aa, Severe acute respiratory syndrome coronavirus 2
  REGION 1..14: note = Table B: HLA-DPA1*03:01-B1*105:01L
DTLKNLSDRVVFVL

SEQ ID NO: 24626 - protein, 14 aa, Severe acute respiratory syndrome coronavirus 2
  REGION 1..14: note = Table B: HLA-DPA1*03:01-B1*105:01L HLA-DQA1*01:03-B1*06:01L HLA-DRB1*15:03L
ELTSMKYFVKIGPE

SEQ ID NO: 24627 - protein, 13 aa, Severe acute respiratory syndrome coronavirus 2
  REGION 1..13: note = Table B: HLA-DPA1*03:01-B1*105:01L
HHSIGFDYVYNPF

SEQ ID NO: 24628 - protein, 13 aa, Severe acute respiratory syndrome coronavirus 2
  REGION 1..13: note = Table B: HLA-DPA1*03:01-B1*105:01L
NLQSNHDLYCQVH

SEQ ID NO: 24629 - protein, 14 aa, Severe acute respiratory syndrome coronavirus 2
  REGION 1..14: note = Table B: HLA-DPA1*03:01-B1*105:01L HLA-DQA1*01:03-B1*06:01L
LQSNHDLYCQVHGN

SEQ ID NO: 24630 - protein, 11 aa, Severe acute respiratory syndrome coronavirus 2
  REGION 1..11: note = Table B: HLA-DPA1*03:01-B1*105:01L HLA-DQA1*01:03-B1*06:01L HLA-DQA1*02:01-B1*03:03L
WTIEYPIIGDE

SEQ ID NO: 24631 - protein, 14 aa, Severe acute respiratory syndrome coronavirus 2
  REGION 1..14: note = Table B: HLA-DPA1*03:01-B1*105:01L
PQADVEWKFYDAQP

SEQ ID NO: 24632 - protein, 17 aa, Severe acute respiratory syndrome coronavirus 2
  REGION 1..17: note = Table B: HLA-DPA1*03:01-B1*105:01L
DKFTDGVCLFWNCNVDR

SEQ ID NO: 24633 - protein, 11 aa, Severe acute respiratory syndrome coronavirus 2
  REGION 1..11: note = Table B: HLA-DPA1*03:01-B1*105:01L HLA-DPA1*01:02-B1*04:01L
FWNCNVDRYPA

SEQ ID NO: 24634 - protein, 13 aa, Severe acute respiratory syndrome coronavirus 2
  REGION 1..13: note = Table B: HLA-DPA1*03:01-B1*105:01L
LKQLPFFYYSDSP

SEQ ID NO: 24635 - protein, 12 aa, Severe acute respiratory syndrome coronavirus 2
  REGION 1..12: note = Table B: HLA-DPA1*03:01-B1*105:01L
SAGFSLWVYKQF

SEQ ID NO: 24636 - protein, 12 aa, Severe acute respiratory syndrome coronavirus 2
  REGION 1..12: note = Table B: HLA-DPA1*03:01-B1*105:01L
QFDTYNLWNTFT

SEQ ID NO: 24637 - protein, 10 aa, Severe acute respiratory syndrome coronavirus 2
  REGION 1..10: note = Table B: HLA-DPA1*03:01-B1*105:01L HLA-DQA1*03:01-B1*03:02L HLA-DPA1*01:02-B1*04:01L
TYNLWNTFTR

SEQ ID NO: 24638 - protein, 13 aa, Severe acute respiratory syndrome coronavirus 2
  REGION 1..13: note = Table B: HLA-DPA1*03:01-B1*105:01L
LNNLGVDIAANTV

SEQ ID NO: 24639 - protein, 14 aa, Severe acute respiratory syndrome coronavirus 2
  REGION 1..14: note = Table B: HLA-DPA1*03:01-B1*105:01L
NNLGVDIAANTVIW

SEQ ID NO: 24640 - protein, 14 aa, Severe acute respiratory syndrome coronavirus 2
  REGION 1..14: note = Table B: HLA-DPA1*03:01-B1*105:01L
PAHISTIGVCSMTD

SEQ ID NO: 24641 - protein, 14 aa, Severe acute respiratory syndrome coronavirus 2
  REGION 1..14: note = Table B: HLA-DPA1*03:01-B1*105:01L
HISTIGVCSMTDIA

SEQ ID NO: 24642 - protein, 14 aa, Severe acute respiratory syndrome coronavirus 2
  REGION 1..14: note = Table B: HLA-DPA1*03:01-B1*105:01L HLA-DQA1*05:05-B1*03:01L HLA-DQA1*02:01-B1*03:03L
ISTIGVCSMTDIAK

SEQ ID NO: 24643 - protein, 16 aa, Severe acute respiratory syndrome coronavirus 2
  REGION 1..16: note = Table B: HLA-DPA1*03:01-B1*105:01L
KPTETICAPLTVFFDG

SEQ ID NO: 24644 - protein, 14 aa, Severe acute respiratory syndrome coronavirus 2
  REGION 1..14: note = Table B: HLA-DPA1*03:01-B1*105:01L
GLQPSVGPKQASLN

SEQ ID NO: 24645 - protein, 14 aa, Severe acute respiratory syndrome coronavirus 2
  REGION 1..14: note = Table B: HLA-DPA1*03:01-B1*105:01L HLA-DQA1*01:03-B1*06:01L
AVKTQFNYYKKVDG

SEQ ID NO: 24646 - protein, 13 aa, Severe acute respiratory syndrome coronavirus 2
  REGION 1..13: note = Table B: HLA-DPA1*03:01-B1*105:01L
PRSQMEIDFLELA

SEQ ID NO: 24647 - protein, 10 aa, Severe acute respiratory syndrome coronavirus 2
  REGION 1..10: note = Table B: HLA-DPA1*03:01-B1*105:01L HLA-DQA1*03:01-B1*03:02L HLA-DPA1*01:02-B1*04:01L HLA-DQA1*01:03-B1*06:01L HLA-DQA1*02:01-B1*03:03L
AMDEFIERYK

SEQ ID NO: 24648 - protein, 13 aa, Severe acute respiratory syndrome coronavirus 2
  REGION 1..13: note = Table B: HLA-DPA1*03:01-B1*105:01L
SQLGGLHLLIGLA

SEQ ID NO: 24649 - protein, 12 aa, Severe acute respiratory syndrome coronavirus 2
  REGION 1..12: note = Table B: HLA-DPA1*03:01-B1*105:01L HLA-DRB1*15:03L
DLSVVSKVVKVT

SEQ ID NO: 24650 - protein, 16 aa, Severe acute respiratory syndrome coronavirus 2
  REGION 1..16: note = Table B: HLA-DPA1*03:01-B1*105:01L HLA-DRB1*15:03L
FMLWCKDGHVETFYPK

SEQ ID NO: 24651 - protein, 15 aa, Severe acute respiratory syndrome coronavirus 2
  REGION 1..15: note = Table B: HLA-DPA1*03:01-B1*105:01L
LYKMQRMLLEKCDLQ

SEQ ID NO: 24652 - protein, 12 aa, Severe acute respiratory syndrome coronavirus 2
  REGION 1..12: note = Table B: HLA-DPA1*03:01-B1*105:01L
KYTQLCQYLNTL

SEQ ID NO: 24653 - protein, 14 aa, Severe acute respiratory syndrome coronavirus 2
  REGION 1..14: note = Table B: HLA-DPA1*03:01-B1*105:01L
NMRVIHFGAGSDKG

SEQ ID NO: 24654 - protein, 12 aa, Severe acute respiratory syndrome coronavirus 2
  REGION 1..12: note = Table B: HLA-DPA1*03:01-B1*105:01L
WDLIISDMYDPK

SEQ ID NO: 24655 - protein, 12 aa, Severe acute respiratory syndrome coronavirus 2
  REGION 1..12: note = Table B: HLA-DPA1*03:01-B1*105:01L HLA-DRB1*15:03L
LIISDMYDPKTK

SEQ ID NO: 24656 - protein, 14 aa, Severe acute respiratory syndrome coronavirus 2
  REGION 1..14: note = Table B: HLA-DPA1*03:01-B1*105:01L
ICGFIQQKLALGGS

SEQ ID NO: 24657 - protein, 11 aa, Severe acute respiratory syndrome coronavirus 2
  REGION 1..11: note = Table B: HLA-DPA1*03:01-B1*105:01L
LGGSVAIKITE

SEQ ID NO: 24658 - protein, 12 aa, Severe acute respiratory syndrome coronavirus 2
  REGION 1..12: note = Table B: HLA-DPA1*03:01-B1*105:01L HLA-DQA1*03:01-B1*03:02L
NADLYKLMGHFA

SEQ ID NO: 24659 - protein, 13 aa, Severe acute respiratory syndrome coronavirus 2
  REGION 1..13: note = Table B: HLA-DPA1*03:01-B1*105:01L
ASSSEAFLIGCNY

SEQ ID NO: 24660 - protein, 12 aa, Severe acute respiratory syndrome coronavirus 2
  REGION 1..12: note = Table B: HLA-DPA1*03:01-B1*105:01L
AFLIGCNYLGKP

SEQ ID NO: 24661 - protein, 11 aa, Severe acute respiratory syndrome coronavirus 2
  REGION 1..11: note = Table B: HLA-DPA1*03:01-B1*105:01L
FVFLVLLPLVS

SEQ ID NO: 24662 - protein, 12 aa, Severe acute respiratory syndrome coronavirus 2
  REGION 1..12: note = Table B: HLA-DPA1*03:01-B1*105:01L
VFLVLLPLVSSQ

SEQ ID NO: 24663 - protein, 12 aa, Severe acute respiratory syndrome coronavirus 2
  REGION 1..12: note = Table B: HLA-DPA1*03:01-B1*105:01L HLA-DRB1*04:08L
TWFHAIHVSGTN

SEQ ID NO: 24664 - protein, 13 aa, Severe acute respiratory syndrome coronavirus 2
  REGION 1..13: note = Table B: HLA-DPA1*03:01-B1*105:01L
PFNDGVYFASTEK

SEQ ID NO: 24665 - protein, 11 aa, Severe acute respiratory syndrome coronavirus 2
  REGION 1..11: note = Table B: HLA-DPA1*03:01-B1*105:01L HLA-DRB1*08:02L
STEKSNIIRGW

SEQ ID NO: 24666 - protein, 12 aa, Severe acute respiratory syndrome coronavirus 2
  REGION 1..12: note = Table B: HLA-DPA1*03:01-B1*105:01L HLA-DQA1*05:05-B1*03:01L HLA-DQA1*02:01-B1*03:03L
ATNVVIKVCEFQ

SEQ ID NO: 24667 - protein, 14 aa, Severe acute respiratory syndrome coronavirus 2
  REGION 1..14: note = Table B: HLA-DPA1*03:01-B1*105:01L
SSANNCTFEYVSQP

SEQ ID NO: 24668 - protein, 12 aa, Severe acute respiratory syndrome coronavirus 2
  REGION 1..12: note = Table B: HLA-DPA1*03:01-B1*105:01L HLA-DQA1*01:03-B1*06:01L HLA-DQA1*02:01-B1*03:03L
SSSGWTAGAAAY

SEQ ID NO: 24669 - protein, 10 aa, Severe acute respiratory syndrome coronavirus 2
  REGION 1..10: note = Table B: HLA-DPA1*03:01-B1*105:01L HLA-DQA1*03:01-B1*03:02L HLA-DPA1*01:02-B1*04:01L HLA-DQA1*01:03-B1*06:01L HLA-DQA1*02:01-B1*03:03L
PFGEVFNATR

SEQ ID NO: 24670 - protein, 14 aa, Severe acute respiratory syndrome coronavirus 2
  REGION 1..14: note = Table B: HLA-DPA1*03:01-B1*105:01L HLA-DQA1*01:03-B1*06:01L
KLNDLCFTNVYADS

SEQ ID NO: 24671 - protein, 15 aa, Severe acute respiratory syndrome coronavirus 2
  REGION 1..15: note = Table B: HLA-DPA1*03:01-B1*105:01L
YNYKLPDDFTGCVIA

SEQ ID NO: 24672 - protein, 15 aa, Severe acute respiratory syndrome coronavirus 2
  REGION 1..15: note = Table B: HLA-DPA1*03:01-B1*105:01L
YRLFRKSNLKPFERD

SEQ ID NO: 24673 - protein, 13 aa, Severe acute respiratory syndrome coronavirus 2
  REGION 1..13: note = Table B: HLA-DPA1*03:01-B1*105:01L
FERDISTEIYQAG

SEQ ID NO: 24674 - protein, 13 aa, Severe acute respiratory syndrome coronavirus 2
  REGION 1..13: note = Table B: HLA-DPA1*03:01-B1*105:01L
ERDISTEIYQAGS

SEQ ID NO: 24675 - protein, 13 aa, Severe acute respiratory syndrome coronavirus 2
  REGION 1..13: note = Table B: HLA-DPA1*03:01-B1*105:01L HLA-DQA1*02:01-B1*03:03L
RDISTEIYQAGST

SEQ ID NO: 24676 - protein, 12 aa, Severe acute respiratory syndrome coronavirus 2
  REGION 1..12: note = Table B: HLA-DPA1*03:01-B1*105:01L
NGVGYQPYRVVV

SEQ ID NO: 24677 - protein, 15 aa, Severe acute respiratory syndrome coronavirus 2
  REGION 1..15: note = Table B: HLA-DPA1*03:01-B1*105:01L
PFQQFGRDIADTTDA

SEQ ID NO: 24678 - protein, 15 aa, Severe acute respiratory syndrome coronavirus 2
  REGION 1..15: note = Table B: HLA-DPA1*03:01-B1*105:01L
AEHVNNSYECDIPIG

SEQ ID NO: 24679 - protein, 14 aa, Severe acute respiratory syndrome coronavirus 2
  REGION 1..14: note = Table B: HLA-DPA1*03:01-B1*105:01L HLA-DQA1*01:03-B1*06:01L
KTSVDCTMYICGDS

SEQ ID NO: 24680 - protein, 13 aa, Severe acute respiratory syndrome coronavirus 2
  REGION 1..13: note = Table B: HLA-DPA1*03:01-B1*105:01L
DSTECSNLLLQYG

SEQ ID NO: 24681 - protein, 14 aa, Severe acute respiratory syndrome coronavirus 2
  REGION 1..14: note = Table B: HLA-DPA1*03:01-B1*105:01L
STECSNLLLQYGSF

SEQ ID NO: 24682 - protein, 11 aa, Severe acute respiratory syndrome coronavirus 2
  REGION 1..11: note = Table B: HLA-DPA1*03:01-B1*105:01L HLA-DQA1*01:03-B1*06:01L
LQYGSFCTQLN

SEQ ID NO: 24683 - protein, 12 aa, Severe acute respiratory syndrome coronavirus 2
  REGION 1..12: note = Table B: HLA-DPA1*03:01-B1*105:01L
YGSFCTQLNRAL

SEQ ID NO: 24684 - protein, 12 aa, Severe acute respiratory syndrome coronavirus 2
  REGION 1..12: note = Table B: HLA-DPA1*03:01-B1*105:01L HLA-DQA1*02:01-B1*03:03L
GSFCTQLNRALT

SEQ ID NO: 24685 - protein, 11 aa, Severe acute respiratory syndrome coronavirus 2
  REGION 1..11: note = Table B: HLA-DPA1*03:01-B1*105:01L
LTGIAVEQDKN

SEQ ID NO: 24686 - protein, 17 aa, Severe acute respiratory syndrome coronavirus 2
  REGION 1..17: note = Table B: HLA-DPA1*03:01-B1*105:01L
PPIKDFGGFNFSQILPD

SEQ ID NO: 24687 - protein, 11 aa, Severe acute respiratory syndrome coronavirus 2
  REGION 1..11: note = Table B: HLA-DPA1*03:01-B1*105:01L
GFNFSQILPDP

SEQ ID NO: 24688 - protein, 14 aa, Severe acute respiratory syndrome coronavirus 2
  REGION 1..14: note = Table B: HLA-DPA1*03:01-B1*105:01L
DIAARDLICAQKFN

SEQ ID NO: 24689 - protein, 13 aa, Severe acute respiratory syndrome coronavirus 2
  REGION 1..13: note = Table B: HLA-DPA1*03:01-B1*105:01L HLA-DQA1*01:03-B1*06:01L
PPLLTDEMIAQYT

SEQ ID NO: 24690 - protein, 14 aa, Severe acute respiratory syndrome coronavirus 2
  REGION 1..14: note = Table B: HLA-DPA1*03:01-B1*105:01L
PLLTDEMIAQYTSA

SEQ ID NO: 24691 - protein, 13 aa, Severe acute respiratory syndrome coronavirus 2
  REGION 1..13: note = Table B: HLA-DPA1*03:01-B1*105:01L
TITSGWTFGAGAA

SEQ ID NO: 24692 - protein, 12 aa, Severe acute respiratory syndrome coronavirus 2
  REGION 1..12: note = Table B: HLA-DPA1*03:01-B1*105:01L HLA-DQA1*05:05-B1*03:01L HLA-DQA1*02:01-B1*03:03L
TKMSECVLGQSK

SEQ ID NO: 24693 - protein, 13 aa, Severe acute respiratory syndrome coronavirus 2
  REGION 1..13: note = Table B: HLA-DPA1*03:01-B1*105:01L
FYEPQIITTDNTF

SEQ ID NO: 24694 - protein, 12 aa, Severe acute respiratory syndrome coronavirus 2
  REGION 1..12: note = Table B: HLA-DPA1*03:01-B1*105:01L
YEQYIKWPWYIW

SEQ ID NO: 24695 - protein, 12 aa, Severe acute respiratory syndrome coronavirus 2
  REGION 1..12: note = Table B: HLA-DPA1*03:01-B1*105:01L
LFMRIFTIGTVT

SEQ ID NO: 24696 - protein, 14 aa, Severe acute respiratory syndrome coronavirus 2
  REGION 1..14: note = Table B: HLA-DPA1*03:01-B1*105:01L HLA-DQA1*05:05-B1*03:01L
TVTLKQGEIKDATP

SEQ ID NO: 24697 - protein, 13 aa, Severe acute respiratory syndrome coronavirus 2
  REGION 1..13: note = Table B: HLA-DPA1*03:01-B1*105:01L
LKQGEIKDATPSD

SEQ ID NO: 24698 - protein, 18 aa, Severe acute respiratory syndrome coronavirus 2
  REGION 1..18: note = Table B: HLA-DPA1*03:01-B1*105:01L
ASKIITLKKRWQLALSKG

SEQ ID NO: 24699 - protein, 13 aa, Severe acute respiratory syndrome coronavirus 2
  REGION 1..13: note = Table B: HLA-DPA1*03:01-B1*105:01L HLA-DQA1*01:03-B1*06:01L
SPISEHDYQIGGY

SEQ ID NO: 24700 - protein, 12 aa, Severe acute respiratory syndrome coronavirus 2
  REGION 1..12: note = Table B: HLA-DPA1*03:01-B1*105:01L
SGVKDCVVLHSY

SEQ ID NO: 24701 - protein, 12 aa, Severe acute respiratory syndrome coronavirus 2
  REGION 1..12: note = Table B: HLA-DPA1*03:01-B1*105:01L
VKDCVVLHSYFT

SEQ ID NO: 24702 - protein, 12 aa, Severe acute respiratory syndrome coronavirus 2
  REGION 1..12: note = Table B: HLA-DPA1*03:01-B1*105:01L HLA-DRB1*15:03L
VLHSYFTSDYYQ

SEQ ID NO: 24703 - protein, 14 aa, Severe acute respiratory syndrome coronavirus 2
  REGION 1..14: note = Table B: HLA-DPA1*03:01-B1*105:01L
LYSTQLSTDTGVEH

SEQ ID NO: 24704 - protein, 15 aa, Severe acute respiratory syndrome coronavirus 2
  REGION 1..15: note = Table B: HLA-DPA1*03:01-B1*105:01L
ALRLCAYCCNIVNVS

SEQ ID NO: 24705 - protein, 10 aa, Severe acute respiratory syndrome coronavirus 2
  REGION 1..10: note = Table B: HLA-DPA1*03:01-B1*105:01L HLA-DQA1*01:03-B1*06:01L
ITVEELKKLL

SEQ ID NO: 24706 - protein, 14 aa, Severe acute respiratory syndrome coronavirus 2
  REGION 1..14: note = Table B: HLA-DPA1*03:01-B1*105:01L
TWICLLQFAYANRN

SEQ ID NO: 24707 - protein, 15 aa, Severe acute respiratory syndrome coronavirus 2
  REGION 1..15: note = Table B: HLA-DPA1*03:01-B1*105:01L
WPVTLACFVLAAVYR

SEQ ID NO: 24708 - protein, 10 aa, Severe acute respiratory syndrome coronavirus 2
  REGION 1..10: note = Table B: HLA-DPA1*03:01-B1*105:01L HLA-DPA1*01:02-B1*04:01L
WLSYFIASFR

SEQ ID NO: 24709 - protein, 12 aa, Severe acute respiratory syndrome coronavirus 2
  REGION 1..12: note = Table B: HLA-DPA1*03:01-B1*105:01L HLA-DQA1*01:03-B1*06:01L
FNPETNILLNVP

SEQ ID NO: 24710 - protein, 10 aa, Severe acute respiratory syndrome coronavirus 2
  REGION 1..10: note = Table B: HLA-DPA1*03:01-B1*105:01L
IAEILLIIMR

SEQ ID NO: 24711 - protein, 11 aa, Severe acute respiratory syndrome coronavirus 2
  REGION 1..11: note = Table B: HLA-DPA1*03:01-B1*105:01L
LITLATCELYH

SEQ ID NO: 24712 - protein, 15 aa, Severe acute respiratory syndrome coronavirus 2
  REGION 1..15: note = Table B: HLA-DPA1*03:01-B1*105:01L HLA-DQA1*05:05-B1*03:01L HLA-DRB1*04:08L HLA-DRB1*15:03L
TTVLLKEPCSSGTYE

SEQ ID NO: 24713 - protein, 12 aa, Severe acute respiratory syndrome coronavirus 2
  REGION 1..12: note = Table B: HLA-DPA1*03:01-B1*105:01L
KFALTCFSTQFA

SEQ ID NO: 24714 - protein, 10 aa, Severe acute respiratory syndrome coronavirus 2
  REGION 1..10: note = Table B: HLA-DPA1*03:01-B1*105:01L
WFSLELQDHN

SEQ ID NO: 24715 - protein, 13 aa, Severe acute respiratory syndrome coronavirus 2
  REGION 1..13: note = Table B: HLA-DPA1*03:01-B1*105:01L HLA-DQA1*05:05-B1*03:01L HLA-DRB1*15:03L
VFLGIITTVAAFH

SEQ ID NO: 24716 - protein, 16 aa, Severe acute respiratory syndrome coronavirus 2
  REGION 1..16: note = Table B: HLA-DPA1*03:01-B1*105:01L HLA-DQA1*01:03-B1*06:01L
VGARKSAPLIELCVDE

SEQ ID NO: 24717 - protein, 16 aa, Severe acute respiratory syndrome coronavirus 2
  REGION 1..16: note = Table B: HLA-DPA1*03:01-B1*105:01L
PLIELCVDEAGSKSPI

SEQ ID NO: 24718 - protein, 11 aa, Severe acute respiratory syndrome coronavirus 2
  REGION 1..11: note = Table B: HLA-DPA1*03:01-B1*105:01L
YTVSCLPFTIN

SEQ ID NO: 24719 - protein, 14 aa, Severe acute respiratory syndrome coronavirus 2
  REGION 1..14: note = Table B: HLA-DPA1*03:01-B1*105:01L
PFTINCQEPKLGSL

SEQ ID NO: 24720 - protein, 14 aa, Severe acute respiratory syndrome coronavirus 2
  REGION 1..14: note = Table B: HLA-DPA1*03:01-B1*105:01L
EPKLGSLVVRCSFY

SEQ ID NO: 24721 - protein, 14 aa, Severe acute respiratory syndrome coronavirus 2
  REGION 1..14: note = Table B: HLA-DPA1*03:01-B1*105:01L HLA-DQA1*02:01-B1*03:03L
PNNTASWFTALTQH

SEQ ID NO: 24722 - protein, 13 aa, Severe acute respiratory syndrome coronavirus 2
  REGION 1..13: note = Table B: HLA-DPA1*03:01-B1*105:01L HLA-DRB1*15:03L
IIWVATEGALNTP

SEQ ID NO: 24723 - protein, 14 aa, Severe acute respiratory syndrome coronavirus 2
  REGION 1..14: note = Table B: HLA-DPA1*03:01-B1*105:01L
PANNAAIVLQLPQG

SEQ ID NO: 24724 - protein, 11 aa, Severe acute respiratory syndrome coronavirus 2
  REGION 1..11: note = Table B: HLA-DPA1*03:01-B1*105:01L
ALALLLLDRLN

SEQ ID NO: 24725 - protein, 15 aa, Severe acute respiratory syndrome coronavirus 2
  REGION 1..15: note = Table B: HLA-DPA1*03:01-B1*105:01L HLA-DRB1*15:01L
TKAYNVTQAFGRRGP

SEQ ID NO: 24726 - protein, 12 aa, Severe acute respiratory syndrome coronavirus 2
  REGION 1..12: note = Table B: HLA-DPA1*03:01-B1*105:01L HLA-DQA1*05:05-B1*03:01L
GDQELIRQGTDY

SEQ ID NO: 24727 - protein, 15 aa, Severe acute respiratory syndrome coronavirus 2
  REGION 1..15: note = Table B: HLA-DPA1*03:01-B1*105:01L
YKHWPQIAQFAPSAS

SEQ ID NO: 24728 - protein, 12 aa, Severe acute respiratory syndrome coronavirus 2
  REGION 1..12: note = Table B: HLA-DPA1*03:01-B1*105:01L
FPFTIYSLLLCR

SEQ ID NO: 24729 - protein, 13 aa, Severe acute respiratory syndrome coronavirus 2
  REGION 1..13: note = Table B: HLA-DPA1*03:01-B1*105:01L
IYSLLLCRMNSRN

SEQ ID NO: 24730 - protein, 10 aa, Severe acute respiratory syndrome coronavirus 2
  REGION 1..10: note = Table B: HLA-DQA1*03:01-B1*03:02L
PGFNEKTHVQ

SEQ ID NO: 24731 - protein, 11 aa, Severe acute respiratory syndrome coronavirus 2
  REGION 1..11: note = Table B: HLA-DQA1*03:01-B1*03:02L
THVQLSLPVLQ

SEQ ID NO: 24732 - protein, 10 aa, Severe acute respiratory syndrome coronavirus 2
  REGION 1..10: note = Table B: HLA-DQA1*03:01-B1*03:02L HLA-DQA1*05:05-B1*03:01L
QLSLPVLQVR

SEQ ID NO: 24733 - protein, 10 aa, Severe acute respiratory syndrome coronavirus 2
  REGION 1..10: note = Table B: HLA-DQA1*03:01-B1*03:02L
DVLVRGFGDS

SEQ ID NO: 24734 - protein, 10 aa, Severe acute respiratory syndrome coronavirus 2
  REGION 1..10: note = Table B: HLA-DQA1*03:01-B1*03:02L
VEEVLSEARQ

SEQ ID NO: 24735 - protein, 10 aa, Severe acute respiratory syndrome coronavirus 2
  REGION 1..10: note = Table B: HLA-DQA1*03:01-B1*03:02L
EEVLSEARQH

SEQ ID NO: 24736 - protein, 10 aa, Severe acute respiratory syndrome coronavirus 2
  REGION 1..10: note = Table B: HLA-DQA1*03:01-B1*03:02L
VLSEARQHLK

SEQ ID NO: 24737 - protein, 10 aa, Severe acute respiratory syndrome coronavirus 2
  REGION 1..10: note = Table B: HLA-DQA1*03:01-B1*03:02L
LEQPYVFIKR

SEQ ID NO: 24738 - protein, 10 aa, Severe acute respiratory syndrome coronavirus 2
  REGION 1..10: note = Table B: HLA-DQA1*03:01-B1*03:02L
QPYVFIKRSD

SEQ ID NO: 24739 - protein, 10 aa, Severe acute respiratory syndrome coronavirus 2
  REGION 1..10: note = Table B: HLA-DQA1*03:01-B1*03:02L
LEGIQYGRSG

SEQ ID NO: 24740 - protein, 10 aa, Severe acute respiratory syndrome coronavirus 2
  REGION 1..10: note = Table B: HLA-DQA1*03:01-B1*03:02L HLA-DQA1*02:01-B1*03:03L
GIQYGRSGET

SEQ ID NO: 24741 - protein, 10 aa, Severe acute respiratory syndrome coronavirus 2
  REGION 1..10: note = Table B: HLA-DQA1*03:01-B1*03:02L
VGEIPVAYRK

SEQ ID NO: 24742 - protein, 10 aa, Severe acute respiratory syndrome coronavirus 2
  REGION 1..10: note = Table B: HLA-DQA1*03:01-B1*03:02L
GGHSYGADLK

SEQ ID NO: 24743 - protein, 11 aa, Severe acute respiratory syndrome coronavirus 2
  REGION 1..11: note = Table B: HLA-DQA1*03:01-B1*03:02L
HSYGADLKSFD

SEQ ID NO: 24744 - protein, 11 aa, Severe acute respiratory syndrome coronavirus 2
  REGION 1..11: note = Table B: HLA-DQA1*03:01-B1*03:02L
YGADLKSFDLG

SEQ ID NO: 24745 - protein, 14 aa, Severe acute respiratory syndrome coronavirus 2
  REGION 1..14: note = Table B: HLA-DQA1*03:01-B1*03:02L
SFDLGDELGTDPYE

SEQ ID NO: 24746 - protein, 12 aa, Severe acute respiratory syndrome coronavirus 2
  REGION 1..12: note = Table B: HLA-DQA1*03:01-B1*03:02L HLA-DRB1*16:01L
TDPYEDFQENWN

SEQ ID NO: 24747 - protein, 10 aa, Severe acute respiratory syndrome coronavirus 2
  REGION 1..10: note = Table B: HLA-DQA1*03:01-B1*03:02L
EDFQENWNTK

SEQ ID NO: 24748 - protein, 11 aa, Severe acute respiratory syndrome coronavirus 2
  REGION 1..11: note = Table B: HLA-DQA1*03:01-B1*03:02L
DFQENWNTKHS

SEQ ID NO: 24749 - protein, 10 aa, Severe acute respiratory syndrome coronavirus 2
  REGION 1..10: note = Table B: HLA-DQA1*03:01-B1*03:02L
WNTKHSSGVT

SEQ ID NO: 24750 - protein, 10 aa, Severe acute respiratory syndrome coronavirus 2
  REGION 1..10: note = Table B: HLA-DQA1*03:01-B1*03:02L
TKHSSGVTRE

SEQ ID NO: 24751 - protein, 10 aa, Severe acute respiratory syndrome coronavirus 2
  REGION 1..10: note = Table B: HLA-DQA1*03:01-B1*03:02L
EHEIAWYTER

SEQ ID NO: 24752 - protein, 10 aa, Severe acute respiratory syndrome coronavirus 2
  REGION 1..10: note = Table B: HLA-DQA1*03:01-B1*03:02L
KLDGFMGRIR

SEQ ID NO: 24753 - protein, 10 aa, Severe acute respiratory syndrome coronavirus 2
  REGION 1..10: note = Table B: HLA-DQA1*03:01-B1*03:02L
RSVYPVASPN

SEQ ID NO: 24754 - protein, 11 aa, Severe acute respiratory syndrome coronavirus 2
  REGION 1..11: note = Table B: HLA-DQA1*03:01-B1*03:02L
GTENLTKEGAT

SEQ ID NO: 24755 - protein, 12 aa, Severe acute respiratory syndrome coronavirus 2
  REGION 1..12: note = Table B: HLA-DQA1*03:01-B1*03:02L
EVGPEHSLAEYH

SEQ ID NO: 24756 - protein, 11 aa, Severe acute respiratory syndrome coronavirus 2
  REGION 1..11: note = Table B: HLA-DQA1*03:01-B1*03:02L
GPEHSLAEYHN

SEQ ID NO: 24757 - protein, 13 aa, Severe acute respiratory syndrome coronavirus 2
  REGION 1..13: note = Table B: HLA-DQA1*03:01-B1*03:02L
PEHSLAEYHNESG

SEQ ID NO: 24758 - protein, 10 aa, Severe acute respiratory syndrome coronavirus 2
  REGION 1..10: note = Table B: HLA-DQA1*03:01-B1*03:02L
AEYHNESGLK

SEQ ID NO: 24759 - protein, 10 aa, Severe acute respiratory syndrome coronavirus 2
  REGION 1..10: note = Table B: HLA-DQA1*03:01-B1*03:02L
NESGLKTILR

SEQ ID NO: 24760 - protein, 10 aa, Severe acute respiratory syndrome coronavirus 2
  REGION 1..10: note = Table B: HLA-DQA1*03:01-B1*03:02L
ESGLKTILRK

SEQ ID NO: 24761 - protein, 10 aa, Severe acute respiratory syndrome coronavirus 2
  REGION 1..10: note = Table B: HLA-DQA1*03:01-B1*03:02L HLA-DQA1*02:01-B1*03:03L
AYWVPRASAN

SEQ ID NO: 24762 - protein, 11 aa, Severe acute respiratory syndrome coronavirus 2
  REGION 1..11: note = Table B: HLA-DQA1*03:01-B1*03:02L
VGEGSEGLNDN

SEQ ID NO: 24763 - protein, 10 aa, Severe acute respiratory syndrome coronavirus 2
  REGION 1..10: note = Table B: HLA-DQA1*03:01-B1*03:02L
NLLEILQKEK

SEQ ID NO: 24764 - protein, 12 aa, Severe acute respiratory syndrome coronavirus 2
  REGION 1..12: note = Table B: HLA-DQA1*03:01-B1*03:02L
TVKGLDYKAFKQ

SEQ ID NO: 24765 - protein, 11 aa, Severe acute respiratory syndrome coronavirus 2
  REGION 1..11: note = Table B: HLA-DQA1*03:01-B1*03:02L
DYKAFKQIVES

SEQ ID NO: 24766 - protein, 13 aa, Severe acute respiratory syndrome coronavirus 2
  REGION 1..13: note = Table B: HLA-DQA1*03:01-B1*03:02L
GKAKKGAWNIGEQ

SEQ ID NO: 24767 - protein, 10 aa, Severe acute respiratory syndrome coronavirus 2
  REGION 1..10: note = Table B: HLA-DQA1*03:01-B1*03:02L
KGAWNIGEQK

SEQ ID NO: 24768 - protein, 10 aa, Severe acute respiratory syndrome coronavirus 2
  REGION 1..10: note = Table B: HLA-DQA1*03:01-B1*03:02L HLA-DQA1*02:01-B1*03:03L
GAWNIGEQKS

SEQ ID NO: 24769 - protein, 10 aa, Severe acute respiratory syndrome coronavirus 2
  REGION 1..10: note = Table B: HLA-DQA1*03:01-B1*03:02L HLA-DQA1*02:01-B1*03:03L
ASEAARVVRS

SEQ ID NO: 24770 - protein, 11 aa, Severe acute respiratory syndrome coronavirus 2
  REGION 1..11: note = Table B: HLA-DQA1*03:01-B1*03:02L
AARVVRSIFSR

SEQ ID NO: 24771 - protein, 10 aa, Severe acute respiratory syndrome coronavirus 2
  REGION 1..10: note = Table B: HLA-DQA1*03:01-B1*03:02L
LDGISQYSLR

SEQ ID NO: 24772 - protein, 10 aa, Severe acute respiratory syndrome coronavirus 2
  REGION 1..10: note = Table B: HLA-DQA1*03:01-B1*03:02L
KFKEGVEFLR

SEQ ID NO: 24773 - protein, 11 aa, Severe acute respiratory syndrome coronavirus 2
  REGION 1..11: note = Table B: HLA-DQA1*03:01-B1*03:02L
EIKESVQTFFK

SEQ ID NO: 24774 - protein, 10 aa, Severe acute respiratory syndrome coronavirus 2
  REGION 1..10: note = Table B: HLA-DQA1*03:01-B1*03:02L
LNLGETFVTH

SEQ ID NO: 24775 - protein, 10 aa, Severe acute respiratory syndrome coronavirus 2
  REGION 1..10: note = Table B: HLA-DQA1*03:01-B1*03:02L HLA-DPA1*01:02-B1*04:01L
LGETFVTHSK

SEQ ID NO: 24776 - protein, 10 aa, Severe acute respiratory syndrome coronavirus 2
  REGION 1..10: note = Table B: HLA-DQA1*03:01-B1*03:02L
GLLMPLKAPK

SEQ ID NO: 24777 - protein, 12 aa, Severe acute respiratory syndrome coronavirus 2
  REGION 1..12: note = Table B: HLA-DQA1*03:01-B1*03:02L
GETLPTEVLTEE

SEQ ID NO: 24778 - protein, 10 aa, Severe acute respiratory syndrome coronavirus 2
  REGION 1..10: note = Table B: HLA-DQA1*03:01-B1*03:02L
MLLEIKDTEK

SEQ ID NO: 24779 - protein, 11 aa, Severe acute respiratory syndrome coronavirus 2
  REGION 1..11: note = Table B: HLA-DQA1*03:01-B1*03:02L
GAPTKVTFGDD

SEQ ID NO: 24780 - protein, 11 aa, Severe acute respiratory syndrome coronavirus 2
  REGION 1..11: note = Table B: HLA-DQA1*03:01-B1*03:02L
KVTFGDDTVIE

SEQ ID NO: 24781 - protein, 12 aa, Severe acute respiratory syndrome coronavirus 2
  REGION 1..12: note = Table B: HLA-DQA1*03:01-B1*03:02L
VTFGDDTVIEVQ

SEQ ID NO: 24782 - protein, 11 aa, Severe acute respiratory syndrome coronavirus 2
  REGION 1..11: note = Table B: HLA-DQA1*03:01-B1*03:02L
SVNITFELDER

SEQ ID NO: 24783 - protein, 10 aa, Severe acute respiratory syndrome coronavirus 2
  REGION 1..10: note = Table B: HLA-DQA1*03:01-B1*03:02L
TFELDERIDK

SEQ ID NO: 24784 - protein, 11 aa, Severe acute respiratory syndrome coronavirus 2
  REGION 1..11: note = Table B: HLA-DQA1*03:01-B1*03:02L
SELLTPLGIDL

SEQ ID NO: 24785 - protein, 10 aa, Severe acute respiratory syndrome coronavirus 2
  REGION 1..10: note = Table B: HLA-DQA1*03:01-B1*03:02L HLA-DPA1*01:02-B1*04:01L HLA-DQA1*01:03-B1*06:01L HLA-DQA1*02:01-B1*03:03L
ESGEFKLASH

SEQ ID NO: 24786 - protein, 12 aa, Severe acute respiratory syndrome coronavirus 2
  REGION 1..12: note = Table B: HLA-DQA1*03:01-B1*03:02L
EPSTQYEYGTED

SEQ ID NO: 24787 - protein, 14 aa, Severe acute respiratory syndrome coronavirus 2
  REGION 1..14: note = Table B: HLA-DQA1*03:01-B1*03:02L
PSTQYEYGTEDDYQ

SEQ ID NO: 24788 - protein, 10 aa, Severe acute respiratory syndrome coronavirus 2
  REGION 1..10: note = Table B: HLA-DQA1*03:01-B1*03:02L HLA-DQA1*01:03-B1*06:01L HLA-DQA1*02:01-B1*03:03L
DYQGKPLEFG

SEQ ID NO: 24789 - protein, 14 aa, Severe acute respiratory syndrome coronavirus 2
  REGION 1..14: note = Table B: HLA-DQA1*03:01-B1*03:02L
YQGKPLEFGATSAA

SEQ ID NO: 24790 - protein, 11 aa, Severe acute respiratory syndrome coronavirus 2
  REGION 1..11: note = Table B: HLA-DQA1*03:01-B1*03:02L HLA-DQA1*02:01-B1*03:03L
GATSAALQPEE

SEQ ID NO: 24791 - protein, 13 aa, Severe acute respiratory syndrome coronavirus 2
  REGION 1..13: note = Table B: HLA-DQA1*03:01-B1*03:02L HLA-DRB1*16:01L
EEQEEDWLDDDSQ

SEQ ID NO: 24792 - protein, 13 aa, Severe acute respiratory syndrome coronavirus 2
  REGION 1..13: note = Table B: HLA-DQA1*03:01-B1*03:02L
EQEEDWLDDDSQQ

SEQ ID NO: 24793 - protein, 11 aa, Severe acute respiratory syndrome coronavirus 2
  REGION 1..11: note = Table B: HLA-DQA1*03:01-B1*03:02L HLA-DQA1*02:01-B1*03:03L
DSQQTVGQQDG

SEQ ID NO: 24794 - protein, 12 aa, Severe acute respiratory syndrome coronavirus 2
  REGION 1..12: note = Table B: HLA-DQA1*03:01-B1*03:02L
SQQTVGQQDGSE

SEQ ID NO: 24795 - protein, 12 aa, Severe acute respiratory syndrome coronavirus 2
  REGION 1..12: note = Table B: HLA-DQA1*03:01-B1*03:02L
QTVGQQDGSEDN

SEQ ID NO: 24796 - protein, 13 aa, Severe acute respiratory syndrome coronavirus 2
  REGION 1..13: note = Table B: HLA-DQA1*03:01-B1*03:02L
DGSEDNQTTTIQT

SEQ ID NO: 24797 - protein, 10 aa, Severe acute respiratory syndrome coronavirus 2
  REGION 1..10: note = Table B: HLA-DQA1*03:01-B1*03:02L
IQTIVEVQPQ

SEQ ID NO: 24798 - protein, 10 aa, Severe acute respiratory syndrome coronavirus 2
  REGION 1..10: note = Table B: HLA-DQA1*03:01-B1*03:02L HLA-DQA1*01:03-B1*06:01L HLA-DQA1*02:01-B1*03:03L
ELTPVVQTIE

SEQ ID NO: 24799 - protein, 10 aa, Severe acute respiratory syndrome coronavirus 2
  REGION 1..10: note = Table B: HLA-DQA1*03:01-B1*03:02L
TPVVQTIEVN

SEQ ID NO: 24800 - protein, 10 aa, Severe acute respiratory syndrome coronavirus 2
  REGION 1..10: note = Table B: HLA-DQA1*03:01-B1*03:02L HLA-DQA1*02:01-B1*03:03L
KNADIVEEAK

SEQ ID NO: 24801 - protein, 10 aa, Severe acute respiratory syndrome coronavirus 2
  REGION 1..10: note = Table B: HLA-DQA1*03:01-B1*03:02L HLA-DQA1*02:01-B1*03:03L
NADIVEEAKK

SEQ ID NO: 24802 - protein, 10 aa, Severe acute respiratory syndrome coronavirus 2
  REGION 1..10: note = Table B: HLA-DQA1*03:01-B1*03:02L
DIVEEAKKVK

SEQ ID NO: 24803 - protein, 10 aa, Severe acute respiratory syndrome coronavirus 2
  REGION 1..10: note = Table B: HLA-DQA1*03:01-B1*03:02L
VEEAKKVKPT

SEQ ID NO: 24804 - protein, 11 aa, Severe acute respiratory syndrome coronavirus 2
  REGION 1..11: note = Table B: HLA-DQA1*03:01-B1*03:02L HLA-DQA1*02:01-B1*03:03L
AANVYLKHGGG

SEQ ID NO: 24805 - protein, 10 aa, Severe acute respiratory syndrome coronavirus 2
  REGION 1..10: note = Table B: HLA-DQA1*03:01-B1*03:02L HLA-DQA1*01:03-B1*06:01L HLA-DQA1*02:01-B1*03:03L
GVAGALNKAT

SEQ ID NO: 24806 - protein, 11 aa, Severe acute respiratory syndrome coronavirus 2
  REGION 1..11: note = Table B: HLA-DQA1*03:01-B1*03:02L HLA-DQA1*01:03-B1*06:01L HLA-DQA1*02:01-B1*03:03L
TNNAMQVESDD

SEQ ID NO: 24807 - protein, 13 aa, Severe acute respiratory syndrome coronavirus 2
  REGION 1..13: note = Table B: HLA-DQA1*03:01-B1*03:02L HLA-DRB1*16:01L
AMQVESDDYIATN

SEQ ID NO: 24808 - protein, 10 aa, Severe acute respiratory syndrome coronavirus 2
  REGION 1..10: note = Table B: HLA-DQA1*03:01-B1*03:02L HLA-DQA1*02:01-B1*03:03L
HVVGPNVNKG

SEQ ID NO: 24809 - protein, 10 aa, Severe acute respiratory syndrome coronavirus 2
  REGION 1..10: note = Table B: HLA-DQA1*03:01-B1*03:02L
VGPNVNKGED

SEQ ID NO: 24810 - protein, 10 aa, Severe acute respiratory syndrome coronavirus 2
  REGION 1..10: note = Table B: HLA-DQA1*03:01-B1*03:02L
PNVNKGEDIQ

SEQ ID NO: 24811 - protein, 11 aa, Severe acute respiratory syndrome coronavirus 2
  REGION 1..11: note = Table B: HLA-DQA1*03:01-B1*03:02L HLA-DQA1*01:03-B1*06:01L HLA-DQA1*02:01-B1*03:03L
LKSAYENFNQH

SEQ ID NO: 24812 - protein, 10 aa, Severe acute respiratory syndrome coronavirus 2
  REGION 1..10: note = Table B: HLA-DQA1*03:01-B1*03:02L HLA-DQA1*02:01-B1*03:03L
AGIFGADPIH

SEQ ID NO: 24813 - protein, 10 aa, Severe acute respiratory syndrome coronavirus 2
  REGION 1..10: note = Table B: HLA-DQA1*03:01-B1*03:02L HLA-DQA1*01:03-B1*06:01L HLA-DQA1*02:01-B1*03:03L
TNVYLAVFDK

SEQ ID NO: 24814 - protein, 10 aa, Severe acute respiratory syndrome coronavirus 2
  REGION 1..10: note = Table B: HLA-DQA1*03:01-B1*03:02L
MKSEKQVEQK

SEQ ID NO: 24815 - protein, 10 aa, Severe acute respiratory syndrome coronavirus 2
  REGION 1..10: note = Table B: HLA-DQA1*03:01-B1*03:02L
VEQKIAEIPK

SEQ ID NO: 24816 - protein, 10 aa, Severe acute respiratory syndrome coronavirus 2
  REGION 1..10: note = Table B: HLA-DQA1*03:01-B1*03:02L
QKIAEIPKEE

SEQ ID NO: 24817 - protein, 11 aa, Severe acute respiratory syndrome coronavirus 2
  REGION 1..11: note = Table B: HLA-DQA1*03:01-B1*03:02L
IPKEEVKPFIT

SEQ ID NO: 24818 - protein, 10 aa, Severe acute respiratory syndrome coronavirus 2
  REGION 1..10: note = Table B: HLA-DQA1*03:01-B1*03:02L
PSVEQRKQDD

SEQ ID NO: 24819 - protein, 11 aa, Severe acute respiratory syndrome coronavirus 2
  REGION 1..11: note = Table B: HLA-DQA1*03:01-B1*03:02L
INGNLHPDSAT

SEQ ID NO: 24820 - protein, 10 aa, Severe acute respiratory syndrome coronavirus 2
  REGION 1..10: note = Table B: HLA-DQA1*03:01-B1*03:02L HLA-DRB1*14:17L HLA-DQA1*02:01-B1*03:03L
AVVIPTKKAG

SEQ ID NO: 24821 - protein, 10 aa, Severe acute respiratory syndrome coronavirus 2
  REGION 1..10: note = Table B: HLA-DQA1*03:01-B1*03:02L HLA-DQA1*01:03-B1*06:01L HLA-DQA1*02:01-B1*03:03L
AGGTTEMLAK

SEQ ID NO: 24822 - protein, 10 aa, Severe acute respiratory syndrome coronavirus 2
  REGION 1..10: note = Table B: HLA-DQA1*03:01-B1*03:02L
GGTTEMLAKA

SEQ ID NO: 24823 - protein, 10 aa, Severe acute respiratory syndrome coronavirus 2
  REGION 1..10: note = Table B: HLA-DQA1*03:01-B1*03:02L HLA-DQA1*01:03-B1*06:01L HLA-DQA1*02:01-B1*03:03L
TTEMLAKALR

SEQ ID NO: 24824 - protein, 11 aa, Severe acute respiratory syndrome coronavirus 2
  REGION 1..11: note = Table B: HLA-DQA1*03:01-B1*03:02L
AKALRKVPTDN

SEQ ID NO: 24825 - protein, 12 aa, Severe acute respiratory syndrome coronavirus 2
  REGION 1..12: note = Table B: HLA-DQA1*03:01-B1*03:02L
ALRKVPTDNYIT

SEQ ID NO: 24826 - protein, 13 aa, Severe acute respiratory syndrome coronavirus 2
  REGION 1..13: note = Table B: HLA-DQA1*03:01-B1*03:02L
KVPTDNYITTYPG

SEQ ID NO: 24827 - protein, 10 aa, Severe acute respiratory syndrome coronavirus 2
  REGION 1..10: note = Table B: HLA-DQA1*03:01-B1*03:02L
LPSIISNEKQ

SEQ ID NO: 24828 - protein, 12 aa, Severe acute respiratory syndrome coronavirus 2
  REGION 1..12: note = Table B: HLA-DQA1*03:01-B1*03:02L HLA-DQA1*02:01-B1*03:03L
NLREMLAHAEET

SEQ ID NO: 24829 - protein, 10 aa, Severe acute respiratory syndrome coronavirus 2
  REGION 1..10: note = Table B: HLA-DQA1*03:01-B1*03:02L
MLAHAEETRK

SEQ ID NO: 24830 - protein, 10 aa, Severe acute respiratory syndrome coronavirus 2
  REGION 1..10: note = Table B: HLA-DQA1*03:01-B1*03:02L HLA-DQA1*01:03-B1*06:01L HLA-DQA1*02:01-B1*03:03L
LAHAEETRKL

SEQ ID NO: 24831 - protein, 10 aa, Severe acute respiratory syndrome coronavirus 2
  REGION 1..10: note = Table B: HLA-DQA1*03:01-B1*03:02L
KLMPVCVETK

SEQ ID NO: 24832 - protein, 10 aa, Severe acute respiratory syndrome coronavirus 2
  REGION 1..10: note = Table B: HLA-DQA1*03:01-B1*03:02L
KAIVSTIQRK

SEQ ID NO: 24833 - protein, 11 aa, Severe acute respiratory syndrome coronavirus 2
  REGION 1..11: note = Table B: HLA-DQA1*03:01-B1*03:02L HLA-DQA1*02:01-B1*03:03L
SKTTVASLINT

SEQ ID NO: 24834 - protein, 10 aa, Severe acute respiratory syndrome coronavirus 2
  REGION 1..10: note = Table B: HLA-DQA1*03:01-B1*03:02L HLA-DQA1*01:03-B1*06:01L HLA-DQA1*02:01-B1*03:03L
HGLNLEEAAR

SEQ ID NO: 24835 - protein, 11 aa, Severe acute respiratory syndrome coronavirus 2
  REGION 1..11: note = Table B: HLA-DQA1*03:01-B1*03:02L
GLNLEEAARYM

SEQ ID NO: 24836 - protein, 11 aa, Severe acute respiratory syndrome coronavirus 2
  REGION 1..11: note = Table B: HLA-DQA1*03:01-B1*03:02L
VPATVSVSSPD

SEQ ID NO: 24837 - protein, 13 aa, Severe acute respiratory syndrome coronavirus 2
  REGION 1..13: note = Table B: HLA-DQA1*03:01-B1*03:02L
PATVSVSSPDAVT

SEQ ID NO: 24838 - protein, 12 aa, Severe acute respiratory syndrome coronavirus 2
  REGION 1..12: note = Table B: HLA-DQA1*03:01-B1*03:02L
SVSSPDAVTAYN

SEQ ID NO: 24839 - protein, 12 aa, Severe acute respiratory syndrome coronavirus 2
  REGION 1..12: note = Table B: HLA-DQA1*03:01-B1*03:02L
VSSPDAVTAYNG

SEQ ID NO: 24840 - protein, 10 aa, Severe acute respiratory syndrome coronavirus 2
  REGION 1..10: note = Table B: HLA-DQA1*03:01-B1*03:02L HLA-DQA1*05:05-B1*03:01L HLA-DQA1*01:03-B1*06:01L HLA-DQA1*02:01-B1*03:03L
TSSSKTPEEH

SEQ ID NO: 24841 - protein, 12 aa, Severe acute respiratory syndrome coronavirus 2
  REGION 1..12: note = Table B: HLA-DQA1*03:01-B1*03:02L
SSKTPEEHFIET

SEQ ID NO: 24842 - protein, 11 aa, Severe acute respiratory syndrome coronavirus 2
  REGION 1..11: note = Table B: HLA-DQA1*03:01-B1*03:02L
GQSTQLGIEFL

SEQ ID NO: 24843 - protein, 10 aa, Severe acute respiratory syndrome coronavirus 2
  REGION 1..10: note = Table B: HLA-DQA1*03:01-B1*03:02L HLA-DQA1*05:05-B1*03:01L HLA-DQA1*01:03-B1*06:01L HLA-DQA1*02:01-B1*03:03L
STQLGIEFLK

SEQ ID NO: 24844 - protein, 10 aa, Severe acute respiratory syndrome coronavirus 2
  REGION 1..10: note = Table B: HLA-DQA1*03:01-B1*03:02L
TQLGIEFLKR

SEQ ID NO: 24845 - protein, 10 aa, Severe acute respiratory syndrome coronavirus 2
  REGION 1..10: note = Table B: HLA-DQA1*03:01-B1*03:02L HLA-DPA1*01:02-B1*04:01L
IEFLKRGDKS

SEQ ID NO: 24846 - protein, 13 aa, Severe acute respiratory syndrome coronavirus 2
  REGION 1..13: note = Table B: HLA-DQA1*03:01-B1*03:02L
RGDKSVYYTSNPT

SEQ ID NO: 24847 - protein, 11 aa, Severe acute respiratory syndrome coronavirus 2
  REGION 1..11: note = Table B: HLA-DQA1*03:01-B1*03:02L
TSNPTTFHLDG

SEQ ID NO: 24848 - protein, 11 aa, Severe acute respiratory syndrome coronavirus 2
  REGION 1..11: note = Table B: HLA-DQA1*03:01-B1*03:02L
HLDGEVITFDN

SEQ ID NO: 24849 - protein, 10 aa, Severe acute respiratory syndrome coronavirus 2
  REGION 1..10: note = Table B: HLA-DQA1*03:01-B1*03:02L
KVFTTVDNIN

SEQ ID NO: 24850 - protein, 10 aa, Severe acute respiratory syndrome coronavirus 2
  REGION 1..10: note = Table B: HLA-DQA1*03:01-B1*03:02L HLA-DQA1*01:03-B1*06:01L HLA-DQA1*02:01-B1*03:03L
DGADVTKIKP

SEQ ID NO: 24851 - protein, 10 aa, Severe acute respiratory syndrome coronavirus 2
  REGION 1..10: note = Table B: HLA-DQA1*03:01-B1*03:02L
GADVTKIKPH

SEQ ID NO: 24852 - protein, 10 aa, Severe acute respiratory syndrome coronavirus 2
  REGION 1..10: note = Table B: HLA-DQA1*03:01-B1*03:02L HLA-DQA1*02:01-B1*03:03L
ADVTKIKPHN

SEQ ID NO: 24853 - protein, 11 aa, Severe acute respiratory syndrome coronavirus 2
  REGION 1..11: note = Table B: HLA-DQA1*03:01-B1*03:02L HLA-DQA1*02:01-B1*03:03L
DVTKIKPHNSH

SEQ ID NO: 24854 - protein, 11 aa, Severe acute respiratory syndrome coronavirus 2
  REGION 1..11: note = Table B: HLA-DQA1*03:01-B1*03:02L
KIKPHNSHEGK

SEQ ID NO: 24855 - protein, 11 aa, Severe acute respiratory syndrome coronavirus 2
  REGION 1..11: note = Table B: HLA-DQA1*03:01-B1*03:02L
GKTFYVLPNDD

SEQ ID NO: 24856 - protein, 11 aa, Severe acute respiratory syndrome coronavirus 2
  REGION 1..11: note = Table B: HLA-DQA1*03:01-B1*03:02L
NPPALQDAYYR

SEQ ID NO: 24857 - protein, 11 aa, Severe acute respiratory syndrome coronavirus 2
  REGION 1..11: note = Table B: HLA-DQA1*03:01-B1*03:02L HLA-DRB1*16:01L HLA-DQA1*02:01-B1*03:03L
DAYYRARAGEA

SEQ ID NO: 24858 - protein, 11 aa, Severe acute respiratory syndrome coronavirus 2
  REGION 1..11: note = Table B: HLA-DQA1*03:01-B1*03:02L HLA-DRB1*16:01L
AYYRARAGEAA

SEQ ID NO: 24859 - protein, 11 aa, Severe acute respiratory syndrome coronavirus 2
  REGION 1..11: note = Table B: HLA-DQA1*03:01-B1*03:02L HLA-DQA1*02:01-B1*03:03L
PFVMMSAPPAQ

SEQ ID NO: 24860 - protein, 10 aa, Severe acute respiratory syndrome coronavirus 2
  REGION 1..10: note = Table B: HLA-DQA1*03:01-B1*03:02L
SAPPAQYELK

SEQ ID NO: 24861 - protein, 11 aa, Severe acute respiratory syndrome coronavirus 2
  REGION 1..11: note = Table B: HLA-DQA1*03:01-B1*03:02L
APPAQYELKHG

SEQ ID NO: 24862 - protein, 11 aa, Severe acute respiratory syndrome coronavirus 2
  REGION 1..11: note = Table B: HLA-DQA1*03:01-B1*03:02L
TKSSEYKGPIT

SEQ ID NO: 24863 - protein, 10 aa, Severe acute respiratory syndrome coronavirus 2
  REGION 1..10: note = Table B: HLA-DQA1*03:01-B1*03:02L HLA-DQA1*01:03-B1*06:01L HLA-DQA1*02:01-B1*03:03L
ENSYTTTIKP

SEQ ID NO: 24864 - protein, 11 aa, Severe acute respiratory syndrome coronavirus 2
  REGION 1..11: note = Table B: HLA-DQA1*03:01-B1*03:02L
TIKPVTYKLDG

SEQ ID NO: 24865 - protein, 11 aa, Severe acute respiratory syndrome coronavirus 2
  REGION 1..11: note = Table B: HLA-DQA1*03:01-B1*03:02L HLA-DQA1*02:01-B1*03:03L
DGVVCTEIDPK

SEQ ID NO: 24866 - protein, 11 aa, Severe acute respiratory syndrome coronavirus 2
  REGION 1..11: note = Table B: HLA-DQA1*03:01-B1*03:02L
PYPNASFDNFK

SEQ ID NO: 24867 - protein, 11 aa, Severe acute respiratory syndrome coronavirus 2
  REGION 1..11: note = Table B: HLA-DQA1*03:01-B1*03:02L
DNFKFVCDNIK

SEQ ID NO: 24868 - protein, 12 aa, Severe acute respiratory syndrome coronavirus 2
  REGION 1..12: note = Table B: HLA-DQA1*03:01-B1*03:02L
FADDLNQLTGYK

SEQ ID NO: 24869 - protein, 10 aa, Severe acute respiratory syndrome coronavirus 2
  REGION 1..10: note = Table B: HLA-DQA1*03:01-B1*03:02L
DLNQLTGYKK

SEQ ID NO: 24870 - protein, 10 aa, Severe acute respiratory syndrome coronavirus 2
  REGION 1..10: note = Table B: HLA-DQA1*03:01-B1*03:02L
DYKHYTPSFK

SEQ ID NO: 24871 - protein, 10 aa, Severe acute respiratory syndrome coronavirus 2
  REGION 1..10: note = Table B: HLA-DQA1*03:01-B1*03:02L
VWHVNNATNK

SEQ ID NO: 24872 - protein, 11 aa, Severe acute respiratory syndrome coronavirus 2
  REGION 1..11: note = Table B: HLA-DQA1*03:01-B1*03:02L
ATYKPNTWCIR

SEQ ID NO: 24873 - protein, 10 aa, Severe acute respiratory syndrome coronavirus 2
  REGION 1..10: note = Table B: HLA-DQA1*03:01-B1*03:02L HLA-DQA1*01:03-B1*06:01L HLA-DQA1*02:01-B1*03:03L
NSFDVLKSED

SEQ ID NO: 24874 - protein, 10 aa, Severe acute respiratory syndrome coronavirus 2
  REGION 1..10: note = Table B: HLA-DQA1*03:01-B1*03:02L HLA-DQA1*01:03-B1*06:01L HLA-DQA1*02:01-B1*03:03L
VGDIILKPAN

SEQ ID NO: 24875 - protein, 10 aa, Severe acute respiratory syndrome coronavirus 2
  REGION 1..10: note = Table B: HLA-DQA1*03:01-B1*03:02L
GDIILKPANN

SEQ ID NO: 24876 - protein, 10 aa, Severe acute respiratory syndrome coronavirus 2
  REGION 1..10: note = Table B: HLA-DQA1*03:01-B1*03:02L HLA-DQA1*01:03-B1*06:01L HLA-DQA1*02:01-B1*03:03L
NSLKITEEVG

SEQ ID NO: 24877 - protein, 11 aa, Severe acute respiratory syndrome coronavirus 2
  REGION 1..11: note = Table B: HLA-DQA1*03:01-B1*03:02L HLA-DQA1*01:03-B1*06:01L HLA-DQA1*02:01-B1*03:03L
VDNSSLTIKKP

SEQ ID NO: 24878 - protein, 10 aa, Severe acute respiratory syndrome coronavirus 2
  REGION 1..10: note = Table B: HLA-DQA1*03:01-B1*03:02L HLA-DQA1*02:01-B1*03:03L
SLTIKKPNEL

SEQ ID NO: 24879 - protein, 10 aa, Severe acute respiratory syndrome coronavirus 2
  REGION 1..10: note = Table B: HLA-DQA1*03:01-B1*03:02L
AAVNSVPWDT

SEQ ID NO: 24880 - protein, 11 aa, Severe acute respiratory syndrome coronavirus 2
  REGION 1..11: note = Table B: HLA-DQA1*03:01-B1*03:02L
VPWDTIANYAK

SEQ ID NO: 24881 - protein, 10 aa, Severe acute respiratory syndrome coronavirus 2
  REGION 1..10: note = Table B: HLA-DQA1*03:01-B1*03:02L
AKNTVKSVGK

SEQ ID NO: 24882 - protein, 10 aa, Severe acute respiratory syndrome coronavirus 2
  REGION 1..10: note = Table B: HLA-DQA1*03:01-B1*03:02L HLA-DQA1*02:01-B1*03:03L
MAPISAMVRM

SEQ ID NO: 24883 - protein, 11 aa, Severe acute respiratory syndrome coronavirus 2
  REGION 1..11: note = Table B: HLA-DQA1*03:01-B1*03:02L
RSFYVYANGGK

SEQ ID NO: 24884 - protein, 14 aa, Severe acute respiratory syndrome coronavirus 2
  REGION 1..14: note = Table B: HLA-DQA1*03:01-B1*03:02L
PINPTDQSSYIVDS

SEQ ID NO: 24885 - protein, 10 aa, Severe acute respiratory syndrome coronavirus 2
  REGION 1..10: note = Table B: HLA-DQA1*03:01-B1*03:02L
HLYFDKAGQK

SEQ ID NO: 24886 - protein, 10 aa, Severe acute respiratory syndrome coronavirus 2
  REGION 1..10: note = Table B: HLA-DQA1*03:01-B1*03:02L
DKAGQKTYER

SEQ ID NO: 24887 - protein, 10 aa, Severe acute respiratory syndrome coronavirus 2
  REGION 1..10: note = Table B: HLA-DQA1*03:01-B1*03:02L
GQKTYERHSL

SEQ ID NO: 24888 - protein, 10 aa, Severe acute respiratory syndrome coronavirus 2
  REGION 1..10: note = Table B: HLA-DQA1*03:01-B1*03:02L HLA-DRB1*16:01L
RHSLSHFVNL

SEQ ID NO: 24889 - protein, 10 aa, Severe acute respiratory syndrome coronavirus 2
  REGION 1..10: note = Table B: HLA-DQA1*03:01-B1*03:02L
SHFVNLDNLR

SEQ ID NO: 24890 - protein, 10 aa, Severe acute respiratory syndrome coronavirus 2
  REGION 1..10: note = Table B: HLA-DQA1*03:01-B1*03:02L
NNTKGSLPIN

SEQ ID NO: 24891 - protein, 11 aa, Severe acute respiratory syndrome coronavirus 2
  REGION 1..11: note = Table B: HLA-DQA1*03:01-B1*03:02L HLA-DQA1*02:01-B1*03:03L
LPINVIVFDGK

SEQ ID NO: 24892 - protein, 11 aa, Severe acute respiratory syndrome coronavirus 2
  REGION 1..11: note = Table B: HLA-DQA1*03:01-B1*03:02L
DQALVSDVGDS

SEQ ID NO: 24893 - protein, 11 aa, Severe acute respiratory syndrome coronavirus 2
  REGION 1..11: note = Table B: HLA-DQA1*03:01-B1*03:02L
DSAEVAVKMFD

SEQ ID NO: 24894 - protein, 10 aa, Severe acute respiratory syndrome coronavirus 2
  REGION 1..10: note = Table B: HLA-DQA1*03:01-B1*03:02L HLA-DQA1*01:03-B1*06:01L HLA-DQA1*02:01-B1*03:03L
TFNVPMEKLK

SEQ ID NO: 24895 - protein, 10 aa, Severe acute respiratory syndrome coronavirus 2
  REGION 1..10: note = Table B: HLA-DQA1*03:01-B1*03:02L
AARQGFVDSD

SEQ ID NO: 24896 - protein, 10 aa, Severe acute respiratory syndrome coronavirus 2
  REGION 1..10: note = Table B: HLA-DQA1*03:01-B1*03:02L
ETKDVVECLK

SEQ ID NO: 24897 - protein, 10 aa, Severe acute respiratory syndrome coronavirus 2
  REGION 1..10: note = Table B: HLA-DQA1*03:01-B1*03:02L
SHQSDIEVTG

SEQ ID NO: 24898 - protein, 10 aa, Severe acute respiratory syndrome coronavirus 2
  REGION 1..10: note = Table B: HLA-DQA1*03:01-B1*03:02L HLA-DQA1*02:01-B1*03:03L
NKVENMTPRD

SEQ ID NO: 24899 - protein, 10 aa, Severe acute respiratory syndrome coronavirus 2
  REGION 1..10: note = Table B: HLA-DQA1*03:01-B1*03:02L
KVENMTPRDL

SEQ ID NO: 24900 - protein, 10 aa, Severe acute respiratory syndrome coronavirus 2
  REGION 1..10: note = Table B: HLA-DQA1*03:01-B1*03:02L
ARHINAQVAK

SEQ ID NO: 24901 - protein, 10 aa, Severe acute respiratory syndrome coronavirus 2
  REGION 1..10: note = Table B: HLA-DQA1*03:01-B1*03:02L HLA-DQA1*02:01-B1*03:03L
HINAQVAKSH

SEQ ID NO: 24902 - protein, 10 aa, Severe acute respiratory syndrome coronavirus 2
  REGION 1..10: note = Table B: HLA-DQA1*03:01-B1*03:02L HLA-DQA1*05:05-B1*03:01L HLA-DQA1*01:03-B1*06:01L HLA-DQA1*02:01-B1*03:03L
DFMSLSEQLR

SEQ ID NO: 24903 - protein, 10 aa, Severe acute respiratory syndrome coronavirus 2
  REGION 1..10: note = Table B: HLA-DQA1*03:01-B1*03:02L
NVVTTKIALK

SEQ ID NO: 24904 - protein, 10 aa, Severe acute respiratory syndrome coronavirus 2
  REGION 1..10: note = Table B: HLA-DQA1*03:01-B1*03:02L
TTKIALKGGK

SEQ ID NO: 24905 - protein, 10 aa, Severe acute respiratory syndrome coronavirus 2
  REGION 1..10: note = Table B: HLA-DQA1*03:01-B1*03:02L
AIFYLITPVH

SEQ ID NO: 24906 - protein, 13 aa, Severe acute respiratory syndrome coronavirus 2
  REGION 1..13: note = Table B: HLA-DQA1*03:01-B1*03:02L HLA-DQA1*02:01-B1*03:03L
TDTCFANKHADFD

SEQ ID NO: 24907 - protein, 13 aa, Severe acute respiratory syndrome coronavirus 2
  REGION 1..13: note = Table B: HLA-DQA1*03:01-B1*03:02L
KHADFDTWFSQRG

SEQ ID NO: 24908 - protein, 11 aa, Severe acute respiratory syndrome coronavirus 2
  REGION 1..11: note = Table B: HLA-DQA1*03:01-B1*03:02L
SQRGGSYTNDK

SEQ ID NO: 24909 - protein, 12 aa, Severe acute respiratory syndrome coronavirus 2
  REGION 1..12: note = Table B: HLA-DQA1*03:01-B1*03:02L HLA-DQA1*02:01-B1*03:03L
TTNGDFLHFLPR

SEQ ID NO: 24910 - protein, 11 aa, Severe acute respiratory syndrome coronavirus 2
  REGION 1..11: note = Table B: HLA-DQA1*03:01-B1*03:02L HLA-DQA1*02:01-B1*03:03L
YDTNVLEGSVA

SEQ ID NO: 24911 - protein, 10 aa, Severe acute respiratory syndrome coronavirus 2
  REGION 1..10: note = Table B: HLA-DQA1*03:01-B1*03:02L HLA-DQA1*05:05-B1*03:01L HLA-DQA1*01:03-B1*06:01L HLA-DQA1*02:01-B1*03:03L
EGSVAYESLR

SEQ ID NO: 24912 - protein, 10 aa, Severe acute respiratory syndrome coronavirus 2
  REGION 1..10: note = Table B: HLA-DQA1*03:01-B1*03:02L
ESLRPDTRYV

SEQ ID NO: 24913 - protein, 11 aa, Severe acute respiratory syndrome coronavirus 2
  REGION 1..11: note = Table B: HLA-DQA1*03:01-B1*03:02L HLA-DQA1*01:03-B1*06:01L
EGSVRVVTTFD

SEQ ID NO: 24914 - protein, 10 aa, Severe acute respiratory syndrome coronavirus 2
  REGION 1..10: note = Table B: HLA-DQA1*03:01-B1*03:02L HLA-DPA1*01:02-B1*04:01L HLA-DRB1*16:01L HLA-DQA1*01:03-B1*06:01L HLA-DQA1*02:01-B1*03:03L
RAFGEYSHVV

SEQ ID NO: 24915 - protein, 10 aa, Severe acute respiratory syndrome coronavirus 2
  REGION 1..10: note = Table B: HLA-DQA1*03:01-B1*03:02L HLA-DPA1*01:02-B1*04:01L
RYLALYNKYK

SEQ ID NO: 24916 - protein, 10 aa, Severe acute respiratory syndrome coronavirus 2
  REGION 1..10: note = Table B: HLA-DQA1*03:01-B1*03:02L
LAKALNDFSN

SEQ ID NO: 24917 - protein, 10 aa, Severe acute respiratory syndrome coronavirus 2
  REGION 1..10: note = Table B: HLA-DQA1*03:01-B1*03:02L HLA-DQA1*01:03-B1*06:01L HLA-DQA1*02:01-B1*03:03L
SAVLQSGFRK

SEQ ID NO: 24918 - protein, 10 aa, Severe acute respiratory syndrome coronavirus 2
  REGION 1..10: note = Table B: HLA-DQA1*03:01-B1*03:02L
KMAFPSGKVE

SEQ ID NO: 24919 - protein, 10 aa, Severe acute respiratory syndrome coronavirus 2
  REGION 1..10: note = Table B: HLA-DQA1*03:01-B1*03:02L
PNYEDLLIRK

SEQ ID NO: 24920 - protein, 11 aa, Severe acute respiratory syndrome coronavirus 2
  REGION 1..11: note = Table B: HLA-DQA1*03:01-B1*03:02L HLA-DQA1*01:03-B1*06:01L HLA-DQA1*02:01-B1*03:03L
EDLLIRKSNHN

SEQ ID NO: 24921 - protein, 10 aa, Severe acute respiratory syndrome coronavirus 2
  REGION 1..10: note = Table B: HLA-DQA1*03:01-B1*03:02L HLA-DQA1*02:01-B1*03:03L
VQLRVIGHSM

SEQ ID NO: 24922 - protein, 10 aa, Severe acute respiratory syndrome coronavirus 2
  REGION 1..10: note = Table B: HLA-DQA1*03:01-B1*03:02L HLA-DRB1*14:17L
KLKVDTANPK

SEQ ID NO: 24923 - protein, 10 aa, Severe acute respiratory syndrome coronavirus 2
  REGION 1..10: note = Table B: HLA-DQA1*03:01-B1*03:02L
YMHHMELPTG

SEQ ID NO: 24924 - protein, 10 aa, Severe acute respiratory syndrome coronavirus 2
  REGION 1..10: note = Table B: HLA-DQA1*03:01-B1*03:02L
HHMELPTGVH

SEQ ID NO: 24925 - protein, 12 aa, Severe acute respiratory syndrome coronavirus 2
  REGION 1..12: note = Table B: HLA-DQA1*03:01-B1*03:02L
QAAGTDTTITVN

SEQ ID NO: 24926 - protein, 11 aa, Severe acute respiratory syndrome coronavirus 2
  REGION 1..11: note = Table B: HLA-DQA1*03:01-B1*03:02L HLA-DPA1*01:02-B1*04:01L HLA-DQA1*02:01-B1*03:03L
VINGDRWFLNR

SEQ ID NO: 24927 - protein, 11 aa, Severe acute respiratory syndrome coronavirus 2
  REGION 1..11: note = Table B: HLA-DQA1*03:01-B1*03:02L
NDFNLVAMKYN

SEQ ID NO: 24928 - protein, 10 aa, Severe acute respiratory syndrome coronavirus 2
  REGION 1..10: note = Table B: HLA-DQA1*03:01-B1*03:02L
DHVDILGPLS

SEQ ID NO: 24929 - protein, 11 aa, Severe acute respiratory syndrome coronavirus 2
  REGION 1..11: note = Table B: HLA-DQA1*03:01-B1*03:02L HLA-DQA1*02:01-B1*03:03L
DILGPLSAQTG

SEQ ID NO: 24930 - protein, 10 aa, Severe acute respiratory syndrome coronavirus 2
  REGION 1..10: note = Table B: HLA-DQA1*03:01-B1*03:02L HLA-DRB1*16:01L HLA-DQA1*02:01-B1*03:03L
VTFQSAVKRT

SEQ ID NO: 24931 - protein, 11 aa, Severe acute respiratory syndrome coronavirus 2
  REGION 1..11: note = Table B: HLA-DQA1*03:01-B1*03:02L HLA-DQA1*02:01-B1*03:03L
SAFAMMFVKHK

SEQ ID NO: 24932 - protein, 10 aa, Severe acute respiratory syndrome coronavirus 2
  REGION 1..10: note = Table B: HLA-DQA1*03:01-B1*03:02L
ARTVYDDGAR

SEQ ID NO: 24933 - protein, 10 aa, Severe acute respiratory syndrome coronavirus 2
  REGION 1..10: note = Table B: HLA-DQA1*03:01-B1*03:02L HLA-DQA1*01:03-B1*06:01L HLA-DQA1*02:01-B1*03:03L
DYLVSTQEFR

SEQ ID NO: 24934 - protein, 11 aa, Severe acute respiratory syndrome coronavirus 2
  REGION 1..11: note = Table B: HLA-DQA1*03:01-B1*03:02L
LPPKNSIDAFK

SEQ ID NO: 24935 - protein, 10 aa, Severe acute respiratory syndrome coronavirus 2
  REGION 1..10: note = Table B: HLA-DQA1*03:01-B1*03:02L HLA-DPA1*01:02-B1*04:01L
SIDAFKLNIK

SEQ ID NO: 24936 - protein, 11 aa, Severe acute respiratory syndrome coronavirus 2
  REGION 1..11: note = Table B: HLA-DQA1*03:01-B1*03:02L
NIKLLGVGGKP

SEQ ID NO: 24937 - protein, 10 aa, Severe acute respiratory syndrome coronavirus 2
  REGION 1..10: note = Table B: HLA-DQA1*03:01-B1*03:02L HLA-DQA1*01:03-B1*06:01L
VLLSVLQQLR

SEQ ID NO: 24938 - protein, 10 aa, Severe acute respiratory syndrome coronavirus 2
  REGION 1..10: note = Table B: HLA-DQA1*03:01-B1*03:02L
QQLRVESSSK

SEQ ID NO: 24939 - protein, 10 aa, Severe acute respiratory syndrome coronavirus 2
  REGION 1..10: note = Table B: HLA-DQA1*03:01-B1*03:02L
QLRVESSSKL

SEQ ID NO: 24940 - protein, 10 aa, Severe acute respiratory syndrome coronavirus 2
  REGION 1..10: note = Table B: HLA-DQA1*03:01-B1*03:02L
QLHNDILLAK

SEQ ID NO: 24941 - protein, 10 aa, Severe acute respiratory syndrome coronavirus 2
  REGION 1..10: note = Table B: HLA-DQA1*03:01-B1*03:02L
AKDTTEAFEK

SEQ ID NO: 24942 - protein, 10 aa, Severe acute respiratory syndrome coronavirus 2
  REGION 1..10: note = Table B: HLA-DQA1*03:01-B1*03:02L
KLCEEMLDNR

SEQ ID NO: 24943 - protein, 11 aa, Severe acute respiratory syndrome coronavirus 2
  REGION 1..11: note = Table B: HLA-DQA1*03:01-B1*03:02L HLA-DQA1*01:03-B1*06:01L HLA-DQA1*02:01-B1*03:03L
DNRATLQAIAS

SEQ ID NO: 24944 - protein, 10 aa, Severe acute respiratory syndrome coronavirus 2
  REGION 1..10: note = Table B: HLA-DQA1*03:01-B1*03:02L HLA-DQA1*01:03-B1*06:01L HLA-DQA1*02:01-B1*03:03L
ATAQEAYEQA

SEQ ID NO: 24945 - protein, 10 aa, Severe acute respiratory syndrome coronavirus 2
  REGION 1..10: note = Table B: HLA-DQA1*03:01-B1*03:02L HLA-DQA1*02:01-B1*03:03L
NGDSEVVLKK

SEQ ID NO: 24946 - protein, 10 aa, Severe acute respiratory syndrome coronavirus 2
  REGION 1..10: note = Table B: HLA-DQA1*03:01-B1*03:02L
DSEVVLKKLK

SEQ ID NO: 24947 - protein, 10 aa, Severe acute respiratory syndrome coronavirus 2
  REGION 1..10: note = Table B: HLA-DQA1*03:01-B1*03:02L
KLKKSLNVAK

SEQ ID NO: 24948 - protein, 10 aa, Severe acute respiratory syndrome coronavirus 2
  REGION 1..10: note = Table B: HLA-DQA1*03:01-B1*03:02L HLA-DQA1*02:01-B1*03:03L
SLNVAKSEFD

SEQ ID NO: 24949 - protein, 10 aa, Severe acute respiratory syndrome coronavirus 2
  REGION 1..10: note = Table B: HLA-DQA1*03:01-B1*03:02L HLA-DQA1*01:03-B1*06:01L HLA-DQA1*02:01-B1*03:03L
NVAKSEFDRD

SEQ ID NO: 24950 - protein, 11 aa, Severe acute respiratory syndrome coronavirus 2
  REGION 1..11: note = Table B: HLA-DQA1*03:01-B1*03:02L
MADQAMTQMYK

SEQ ID NO: 24951 - protein, 10 aa, Severe acute respiratory syndrome coronavirus 2
  REGION 1..10: note = Table B: HLA-DQA1*03:01-B1*03:02L
AMTQMYKQAR

SEQ ID NO: 24952 - protein, 11 aa, Severe acute respiratory syndrome coronavirus 2
  REGION 1..11: note = Table B: HLA-DQA1*03:01-B1*03:02L HLA-DQA1*02:01-B1*03:03L
DKRAKVTSAMQ

SEQ ID NO: 24953 - protein, 10 aa, Severe acute respiratory syndrome coronavirus 2
  REGION 1..10: note = Table B: HLA-DQA1*03:01-B1*03:02L
QTMLFTMLRK

SEQ ID NO: 24954 - protein, 10 aa, Severe acute respiratory syndrome coronavirus 2
  REGION 1..10: note = Table B: HLA-DQA1*03:01-B1*03:02L
NDALNNIINN

SEQ ID NO: 24955 - protein, 11 aa, Severe acute respiratory syndrome coronavirus 2
  REGION 1..11: note = Table B: HLA-DQA1*03:01-B1*03:02L
SALWEIQQVVD

SEQ ID NO: 24956 - protein, 11 aa, Severe acute respiratory syndrome coronavirus 2
  REGION 1..11: note = Table B: HLA-DQA1*03:01-B1*03:02L HLA-DQA1*01:03-B1*06:01L HLA-DQA1*02:01-B1*03:03L
DADSKIVQLSE

SEQ ID NO: 24957 - protein, 10 aa, Severe acute respiratory syndrome coronavirus 2
  REGION 1..10: note = Table B: HLA-DQA1*03:01-B1*03:02L
AWPLIVTALR

SEQ ID NO: 24958 - protein, 11 aa, Severe acute respiratory syndrome coronavirus 2
  REGION 1..11: note = Table B: HLA-DQA1*03:01-B1*03:02L
KLQNNELSPVA

SEQ ID NO: 24959 - protein, 10 aa, Severe acute respiratory syndrome coronavirus 2
  REGION 1..10: note = Table B: HLA-DQA1*03:01-B1*03:02L HLA-DQA1*02:01-B1*03:03L
NNELSPVALR

SEQ ID NO: 24960 - protein, 14 aa, Severe acute respiratory syndrome coronavirus 2
  REGION 1..14: note = Table B: HLA-DQA1*03:01-B1*03:02L
GTTQTACTDDNALA

SEQ ID NO: 24961 - protein, 12 aa, Severe acute respiratory syndrome coronavirus 2
  REGION 1..12: note = Table B: HLA-DQA1*03:01-B1*03:02L
FPKSDGTGTIYT

SEQ ID NO: 24962 - protein, 10 aa, Severe acute respiratory syndrome coronavirus 2
  REGION 1..10: note = Table B: HLA-DQA1*03:01-B1*03:02L
TDTPKGPKVK

SEQ ID NO: 24963 - protein, 10 aa, Severe acute respiratory syndrome coronavirus 2
  REGION 1..10: note = Table B: HLA-DQA1*03:01-B1*03:02L HLA-DQA1*01:03-B1*06:01L HLA-DQA1*02:01-B1*03:03L
GSLAATVRLQ

SEQ ID NO: 24964 - protein, 10 aa, Severe acute respiratory syndrome coronavirus 2
  REGION 1..10: note = Table B: HLA-DQA1*03:01-B1*03:02L
AGNATEVPAN

SEQ ID NO: 24965 - protein, 11 aa, Severe acute respiratory syndrome coronavirus 2
  REGION 1..11: note = Table B: HLA-DQA1*03:01-B1*03:02L
GNATEVPANST

SEQ ID NO: 24966 - protein, 10 aa, Severe acute respiratory syndrome coronavirus 2
  REGION 1..10: note = Table B: HLA-DQA1*03:01-B1*03:02L
GGQPITNCVK

SEQ ID NO: 24967 - protein, 10 aa, Severe acute respiratory syndrome coronavirus 2
  REGION 1..10: note = Table B: HLA-DQA1*03:01-B1*03:02L
TVTPEANMDQ

SEQ ID NO: 24968 - protein, 11 aa, Severe acute respiratory syndrome coronavirus 2
  REGION 1..11: note = Table B: HLA-DQA1*03:01-B1*03:02L
REPMLQSADAQ

SEQ ID NO: 24969 - protein, 10 aa, Severe acute respiratory syndrome coronavirus 2
  REGION 1..10: note = Table B: HLA-DQA1*03:01-B1*03:02L HLA-DQA1*01:03-B1*06:01L HLA-DQA1*02:01-B1*03:03L
STDVVYRAFD

SEQ ID NO: 24970 - protein, 10 aa, Severe acute respiratory syndrome coronavirus 2
  REGION 1..10: note = Table B: HLA-DQA1*03:01-B1*03:02L
YRAFDIYNDK

SEQ ID NO: 24971 - protein, 10 aa, Severe acute respiratory syndrome coronavirus 2
  REGION 1..10: note = Table B: HLA-DQA1*03:01-B1*03:02L
YNDKVAGFAK

SEQ ID NO: 24972 - protein, 10 aa, Severe acute respiratory syndrome coronavirus 2
  REGION 1..10: note = Table B: HLA-DQA1*03:01-B1*03:02L
RFQEKDEDDN

SEQ ID NO: 24973 - protein, 10 aa, Severe acute respiratory syndrome coronavirus 2
  REGION 1..10: note = Table B: HLA-DQA1*03:01-B1*03:02L HLA-DPA1*01:02-B1*04:01L
LIDSYFVVKR

SEQ ID NO: 24974 - protein, 10 aa, Severe acute respiratory syndrome coronavirus 2
  REGION 1..10: note = Table B: HLA-DQA1*03:01-B1*03:02L HLA-DPA1*01:02-B1*04:01L HLA-DQA1*01:03-B1*06:01L HLA-DQA1*02:01-B1*03:03L
DSYFVVKRHT

SEQ ID NO: 24975 - protein, 10 aa, Severe acute respiratory syndrome coronavirus 2
  REGION 1..10: note = Table B: HLA-DQA1*03:01-B1*03:02L HLA-DQA1*01:03-B1*06:01L HLA-DQA1*02:01-B1*03:03L
HTFSNYQHEE

SEQ ID NO: 24976 - protein, 10 aa, Severe acute respiratory syndrome coronavirus 2
  REGION 1..10: note = Table B: HLA-DQA1*03:01-B1*03:02L HLA-DQA1*02:01-B1*03:03L
DGDMVPHISR

SEQ ID NO: 24977 - protein, 10 aa, Severe acute respiratory syndrome coronavirus 2
  REGION 1..10: note = Table B: HLA-DQA1*03:01-B1*03:02L HLA-DQA1*02:01-B1*03:03L
MVPHISRQRL

SEQ ID NO: 24978 - protein, 10 aa, Severe acute respiratory syndrome coronavirus 2
  REGION 1..10: note = Table B: HLA-DQA1*03:01-B1*03:02L HLA-DQA1*02:01-B1*03:03L
RALTAESHVD

SEQ ID NO: 24979 - protein, 10 aa, Severe acute respiratory syndrome coronavirus 2
  REGION 1..10: note = Table B: HLA-DQA1*03:01-B1*03:02L
DTDLTKPYIK

SEQ ID NO: 24980 - protein, 11 aa, Severe acute respiratory syndrome coronavirus 2
  REGION 1..11: note = Table B: HLA-DQA1*03:01-B1*03:02L
DLLKYDFTEER

SEQ ID NO: 24981 - protein, 11 aa, Severe acute respiratory syndrome coronavirus 2
  REGION 1..11: note = Table B: HLA-DQA1*03:01-B1*03:02L
FTEERLKLFDR

SEQ ID NO: 24982 - protein, 10 aa, Severe acute respiratory syndrome coronavirus 2
  REGION 1..10: note = Table B: HLA-DQA1*03:01-B1*03:02L
PPTSFGPLVR

SEQ ID NO: 24983 - protein, 11 aa, Severe acute respiratory syndrome coronavirus 2
  REGION 1..11: note = Table B: HLA-DQA1*03:01-B1*03:02L
GPLVRKIFVDG

SEQ ID NO: 24984 - protein, 10 aa, Severe acute respiratory syndrome coronavirus 2
  REGION 1..10: note = Table B: HLA-DQA1*03:01-B1*03:02L
QDVNLHSSRL

SEQ ID NO: 24985 - protein, 10 aa, Severe acute respiratory syndrome coronavirus 2
  REGION 1..10: note = Table B: HLA-DQA1*03:01-B1*03:02L
DVNLHSSRLS

SEQ ID NO: 24986 - protein, 11 aa, Severe acute respiratory syndrome coronavirus 2
  REGION 1..11: note = Table B: HLA-DQA1*03:01-B1*03:02L
ADPAMHAASGN

SEQ ID NO: 24987 - protein, 10 aa, Severe acute respiratory syndrome coronavirus 2
  REGION 1..10: note = Table B: HLA-DQA1*03:01-B1*03:02L HLA-DQA1*01:03-B1*06:01L HLA-DQA1*02:01-B1*03:03L
ASGNLLLDKR

SEQ ID NO: 24988 - protein, 11 aa, Severe acute respiratory syndrome coronavirus 2
  REGION 1..11: note = Table B: HLA-DQA1*03:01-B1*03:02L HLA-DQA1*01:03-B1*06:01L HLA-DQA1*02:01-B1*03:03L
SGNLLLDKRTT

SEQ ID NO: 24989 - protein, 10 aa, Severe acute respiratory syndrome coronavirus 2
  REGION 1..10: note = Table B: HLA-DQA1*03:01-B1*03:02L HLA-DRB1*16:01L HLA-DQA1*02:01-B1*03:03L
TVKPGNFNKD

SEQ ID NO: 24990 - protein, 12 aa, Severe acute respiratory syndrome coronavirus 2
  REGION 1..12: note = Table B: HLA-DQA1*03:01-B1*03:02L
VKPGNFNKDFYD

SEQ ID NO: 24991 - protein, 10 aa, Severe acute respiratory syndrome coronavirus 2
  REGION 1..10: note = Table B: HLA-DQA1*03:01-B1*03:02L HLA-DQA1*02:01-B1*03:03L
DFAVSKGFFK

SEQ ID NO: 24992 - protein, 10 aa, Severe acute respiratory syndrome coronavirus 2
  REGION 1..10: note = Table B: HLA-DQA1*03:01-B1*03:02L HLA-DQA1*02:01-B1*03:03L
AVSKGFFKEG

SEQ ID NO: 24993 - protein, 10 aa, Severe acute respiratory syndrome coronavirus 2
  REGION 1..10: note = Table B: HLA-DQA1*03:01-B1*03:02L HLA-DQA1*02:01-B1*03:03L
FKEGSSVELK

SEQ ID NO: 24994 - protein, 10 aa, Severe acute respiratory syndrome coronavirus 2
  REGION 1..10: note = Table B: HLA-DQA1*03:01-B1*03:02L
ANQVIVNNLD

SEQ ID NO: 24995 - protein, 10 aa, Severe acute respiratory syndrome coronavirus 2
  REGION 1..10: note = Table B: HLA-DQA1*03:01-B1*03:02L HLA-DQA1*02:01-B1*03:03L
DKSAGFPFNK

SEQ ID NO: 24996 - protein, 12 aa, Severe acute respiratory syndrome coronavirus 2
  REGION 1..12: note = Table B: HLA-DQA1*03:01-B1*03:02L
YYDSMSYEDQDA

SEQ ID NO: 24997 - protein, 10 aa, Severe acute respiratory syndrome coronavirus 2
  REGION 1..10: note = Table B: HLA-DQA1*03:01-B1*03:02L
DQDALFAYTK

SEQ ID NO: 24998 - protein, 11 aa, Severe acute respiratory syndrome coronavirus 2
  REGION 1..11: note = Table B: HLA-DQA1*03:01-B1*03:02L HLA-DQA1*02:01-B1*03:03L
TKRNVIPTITQ

SEQ ID NO: 24999 - protein, 10 aa, Severe acute respiratory syndrome coronavirus 2
  REGION 1..10: note = Table B: HLA-DQA1*03:01-B1*03:02L HLA-DQA1*01:03-B1*06:01L
NVIPTITQMN

SEQ ID NO: 25000 - protein, 10 aa, Severe acute respiratory syndrome coronavirus 2
  REGION 1..10: note = Table B: HLA-DQA1*03:01-B1*03:02L
IPTITQMNLK

SEQ ID NO: 25001 - protein, 10 aa, Severe acute respiratory syndrome coronavirus 2
  REGION 1..10: note = Table B: HLA-DQA1*03:01-B1*03:02L
KLLKSIAATR

SEQ ID NO: 25002 - protein, 11 aa, Severe acute respiratory syndrome coronavirus 2
  REGION 1..11: note = Table B: HLA-DQA1*03:01-B1*03:02L HLA-DRB1*16:01L
VVIGTSKFYGG

SEQ ID NO: 25003 - protein, 11 aa, Severe acute respiratory syndrome coronavirus 2
  REGION 1..11: note = Table B: HLA-DQA1*03:01-B1*03:02L
KFYGGWHNMLK

SEQ ID NO: 25004 - protein, 10 aa, Severe acute respiratory syndrome coronavirus 2
  REGION 1..10: note = Table B: HLA-DQA1*03:01-B1*03:02L HLA-DQA1*01:03-B1*06:01L HLA-DQA1*02:01-B1*03:03L
IMASLVLARK

SEQ ID NO: 25005 - protein, 11 aa, Severe acute respiratory syndrome coronavirus 2
  REGION 1..11: note = Table B: HLA-DQA1*03:01-B1*03:02L
GGSLYVKPGGT

SEQ ID NO: 25006 - protein, 12 aa, Severe acute respiratory syndrome coronavirus 2
  REGION 1..12: note = Table B: HLA-DQA1*03:01-B1*03:02L
YVKPGGTSSGDA

SEQ ID NO: 25007 - protein, 14 aa, Severe acute respiratory syndrome coronavirus 2
  REGION 1..14: note = Table B: HLA-DQA1*03:01-B1*03:02L HLA-DQA1*05:05-B1*03:01L
KPGGTSSGDATTAY

SEQ ID NO: 25008 - protein, 12 aa, Severe acute respiratory syndrome coronavirus 2
  REGION 1..12: note = Table B: HLA-DQA1*03:01-B1*03:02L
SGDATTAYANSV

SEQ ID NO: 25009 - protein, 11 aa, Severe acute respiratory syndrome coronavirus 2
  REGION 1..11: note = Table B: HLA-DQA1*03:01-B1*03:02L
DGNKIADKYVR

SEQ ID NO: 25010 - protein, 10 aa, Severe acute respiratory syndrome coronavirus 2
  REGION 1..10: note = Table B: HLA-DQA1*03:01-B1*03:02L HLA-DRB1*16:01L HLA-DQA1*02:01-B1*03:03L
KIADKYVRNL

SEQ ID NO: 25011 - protein, 11 aa, Severe acute respiratory syndrome coronavirus 2
  REGION 1..11: note = Table B: HLA-DQA1*03:01-B1*03:02L
RNRDVDTDFVN

SEQ ID NO: 25012 - protein, 11 aa, Severe acute respiratory syndrome coronavirus 2
  REGION 1..11: note = Table B: HLA-DQA1*03:01-B1*03:02L
NRDVDTDFVNE

SEQ ID NO: 25013 - protein, 12 aa, Severe acute respiratory syndrome coronavirus 2
  REGION 1..12: note = Table B: HLA-DQA1*03:01-B1*03:02L
DVDTDFVNEFYA

SEQ ID NO: 25014 - protein, 10 aa, Severe acute respiratory syndrome coronavirus 2
  REGION 1..10: note = Table B: HLA-DQA1*03:01-B1*03:02L HLA-DQA1*02:01-B1*03:03L
GLVASIKNFK

SEQ ID NO: 25015 - protein, 10 aa, Severe acute respiratory syndrome coronavirus 2
  REGION 1..10: note = Table B: HLA-DQA1*03:01-B1*03:02L
ETDLTKGPHE

SEQ ID NO: 25016 - protein, 11 aa, Severe acute respiratory syndrome coronavirus 2
  REGION 1..11: note = Table B: HLA-DQA1*03:01-B1*03:02L
GPHEFCSQHTM

SEQ ID NO: 25017 - protein, 11 aa, Severe acute respiratory syndrome coronavirus 2
  REGION 1..11: note = Table B: HLA-DQA1*03:01-B1*03:02L HLA-DQA1*02:01-B1*03:03L
DGTLMIERFVS

SEQ ID NO: 25018 - protein, 11 aa, Severe acute respiratory syndrome coronavirus 2
  REGION 1..11: note = Table B: HLA-DQA1*03:01-B1*03:02L
AIDAYPLTKHP

SEQ ID NO: 25019 - protein, 10 aa, Severe acute respiratory syndrome coronavirus 2
  REGION 1..10: note = Table B: HLA-DQA1*03:01-B1*03:02L
AYPLTKHPNQ

SEQ ID NO: 25020 - protein, 10 aa, Severe acute respiratory syndrome coronavirus 2
  REGION 1..10: note = Table B: HLA-DQA1*03:01-B1*03:02L
DNTSRYWEPE

SEQ ID NO: 25021 - protein, 10 aa, Severe acute respiratory syndrome coronavirus 2
  REGION 1..10: note = Table B: HLA-DQA1*03:01-B1*03:02L
TPHTVLQAVG

SEQ ID NO: 25022 - protein, 10 aa, Severe acute respiratory syndrome coronavirus 2
  REGION 1..10: note = Table B: HLA-DQA1*03:01-B1*03:02L HLA-DQA1*02:01-B1*03:03L
YDHVISTSHK

SEQ ID NO: 25023 - protein, 10 aa, Severe acute respiratory syndrome coronavirus 2
  REGION 1..10: note = Table B: HLA-DQA1*03:01-B1*03:02L HLA-DQA1*01:03-B1*06:01L HLA-DQA1*02:01-B1*03:03L
ANGQVFGLYK

SEQ ID NO: 25024 - protein, 13 aa, Severe acute respiratory syndrome coronavirus 2
  REGION 1..13: note = Table B: HLA-DQA1*03:01-B1*03:02L HLA-DQA1*01:03-B1*06:01L
VGSDNVTDFNAIA

SEQ ID NO: 25025 - protein, 11 aa, Severe acute respiratory syndrome coronavirus 2
  REGION 1..11: note = Table B: HLA-DQA1*03:01-B1*03:02L
ATEETFKLSYG

SEQ ID NO: 25026 - protein, 10 aa, Severe acute respiratory syndrome coronavirus 2
  REGION 1..10: note = Table B: HLA-DQA1*03:01-B1*03:02L
ATVREVLSDR

SEQ ID NO: 25027 - protein, 10 aa, Severe acute respiratory syndrome coronavirus 2
  REGION 1..10: note = Table B: HLA-DQA1*03:01-B1*03:02L HLA-DQA1*02:01-B1*03:03L
TVREVLSDRE

SEQ ID NO: 25028 - protein, 11 aa, Severe acute respiratory syndrome coronavirus 2
  REGION 1..11: note = Table B: HLA-DQA1*03:01-B1*03:02L HLA-DRB1*16:01L HLA-DQA1*02:01-B1*03:03L
VREVLSDRELH

SEQ ID NO: 25029 - protein, 10 aa, Severe acute respiratory syndrome coronavirus 2
  REGION 1..10: note = Table B: HLA-DQA1*03:01-B1*03:02L
TGYRVTKNSK

SEQ ID NO: 25030 - protein, 10 aa, Severe acute respiratory syndrome coronavirus 2
  REGION 1..10: note = Table B: HLA-DQA1*03:01-B1*03:02L HLA-DQA1*01:03-B1*06:01L HLA-DQA1*02:01-B1*03:03L
NSKVQIGEYT

SEQ ID NO: 25031 - protein, 11 aa, Severe acute respiratory syndrome coronavirus 2
  REGION 1..11: note = Table B: HLA-DQA1*03:01-B1*03:02L
VQIGEYTFEKG

SEQ ID NO: 25032 - protein, 11 aa, Severe acute respiratory syndrome coronavirus 2
  REGION 1..11: note = Table B: HLA-DQA1*03:01-B1*03:02L HLA-DQA1*01:03-B1*06:01L HLA-DQA1*02:01-B1*03:03L
DYGDAVVYRGT

SEQ ID NO: 25033 - protein, 10 aa, Severe acute respiratory syndrome coronavirus 2
  REGION 1..10: note = Table B: HLA-DQA1*03:01-B1*03:02L
GTTTYKLNVG

SEQ ID NO: 25034 - protein, 10 aa, Severe acute respiratory syndrome coronavirus 2
  REGION 1..10: note = Table B: HLA-DQA1*03:01-B1*03:02L HLA-DQA1*01:03-B1*06:01L HLA-DQA1*02:01-B1*03:03L
HTVMPLSAPT

SEQ ID NO: 25035 - protein, 12 aa, Severe acute respiratory syndrome coronavirus 2
  REGION 1..12: note = Table B: HLA-DQA1*03:01-B1*03:02L
MPLSAPTLVPQE

SEQ ID NO: 25036 - protein, 10 aa, Severe acute respiratory syndrome coronavirus 2
  REGION 1..10: note = Table B: HLA-DQA1*03:01-B1*03:02L
TLVPQEHYVR

SEQ ID NO: 25037 - protein, 10 aa, Severe acute respiratory syndrome coronavirus 2
  REGION 1..10: note = Table B: HLA-DQA1*03:01-B1*03:02L HLA-DQA1*02:01-B1*03:03L
GLALYYPSAR

SEQ ID NO: 25038 - protein, 10 aa, Severe acute respiratory syndrome coronavirus 2
  REGION 1..10: note = Table B: HLA-DQA1*03:01-B1*03:02L
HAAVDALCEK

SEQ ID NO: 25039 - protein, 10 aa, Severe acute respiratory syndrome coronavirus 2
  REGION 1..10: note = Table B: HLA-DQA1*03:01-B1*03:02L
VNALPETTAD

SEQ ID NO: 25040 - protein, 10 aa, Severe acute respiratory syndrome coronavirus 2
  REGION 1..10: note = Table B: HLA-DQA1*03:01-B1*03:02L
LPAPRTLLTK

SEQ ID NO: 25041 - protein, 10 aa, Severe acute respiratory syndrome coronavirus 2
  REGION 1..10: note = Table B: HLA-DQA1*03:01-B1*03:02L HLA-DPA1*01:02-B1*04:01L HLA-DQA1*01:03-B1*06:01L HLA-DQA1*02:01-B1*03:03L
YKGVITHDVS

SEQ ID NO: 25042 - protein, 10 aa, Severe acute respiratory syndrome coronavirus 2
  REGION 1..10: note = Table B: HLA-DQA1*03:01-B1*03:02L
THDVSSAINR

SEQ ID NO: 25043 - protein, 10 aa, Severe acute respiratory syndrome coronavirus 2
  REGION 1..10: note = Table B: HLA-DQA1*03:01-B1*03:02L
HDVSSAINRP

SEQ ID NO: 25044 - protein, 11 aa, Severe acute respiratory syndrome coronavirus 2
  REGION 1..11: note = Table B: HLA-DQA1*03:01-B1*03:02L
RPQIGVVREFL

SEQ ID NO: 25045 - protein, 12 aa, Severe acute respiratory syndrome coronavirus 2
  REGION 1..12: note = Table B: HLA-DQA1*03:01-B1*03:02L
RKAVFISPYNSQ

SEQ ID NO: 25046 - protein, 10 aa, Severe acute respiratory syndrome coronavirus 2
  REGION 1..10: note = Table B: HLA-DQA1*03:01-B1*03:02L HLA-DQA1*02:01-B1*03:03L
QNAVASKILG

SEQ ID NO: 25047 - protein, 11 aa, Severe acute respiratory syndrome coronavirus 2
  REGION 1..11: note = Table B: HLA-DQA1*03:01-B1*03:02L
TVDSSQGSEYD

SEQ ID NO: 25048 - protein, 15 aa, Severe acute respiratory syndrome coronavirus 2
  REGION 1..15: note = Table B: HLA-DQA1*03:01-B1*03:02L
VDSSQGSEYDYVIFT

SEQ ID NO: 25049 - protein, 10 aa, Severe acute respiratory syndrome coronavirus 2
  REGION 1..10: note = Table B: HLA-DQA1*03:01-B1*03:02L HLA-DPA1*01:02-B1*04:01L HLA-DQA1*02:01-B1*03:03L
VNRFNVAITR

SEQ ID NO: 25050 - protein, 10 aa, Severe acute respiratory syndrome coronavirus 2
  REGION 1..10: note = Table B: HLA-DQA1*03:01-B1*03:02L HLA-DQA1*01:03-B1*06:01L HLA-DQA1*02:01-B1*03:03L
QFTSLEIPRR

SEQ ID NO: 25051 - protein, 10 aa, Severe acute respiratory syndrome coronavirus 2
  REGION 1..10: note = Table B: HLA-DQA1*03:01-B1*03:02L
QAENVTGLFK

SEQ ID NO: 25052 - protein, 10 aa, Severe acute respiratory syndrome coronavirus 2
  REGION 1..10: note = Table B: HLA-DQA1*03:01-B1*03:02L
KVITGLHPTQ

SEQ ID NO: 25053 - protein, 10 aa, Severe acute respiratory syndrome coronavirus 2
  REGION 1..10: note = Table B: HLA-DQA1*03:01-B1*03:02L
APTHLSVDTK

SEQ ID NO: 25054 - protein, 11 aa, Severe acute respiratory syndrome coronavirus 2
  REGION 1..11: note = Table B: HLA-DQA1*03:01-B1*03:02L
IPGIPKDMTYR

SEQ ID NO: 25055 - protein, 10 aa, Severe acute respiratory syndrome coronavirus 2
  REGION 1..10: note = Table B: HLA-DQA1*03:01-B1*03:02L HLA-DQA1*02:01-B1*03:03L
YPNMFITREE

SEQ ID NO: 25056 - protein, 10 aa, Severe acute respiratory syndrome coronavirus 2
  REGION 1..10: note = Table B: HLA-DQA1*03:01-B1*03:02L HLA-DPA1*01:02-B1*04:01L HLA-DRB1*16:01L HLA-DQA1*02:01-B1*03:03L
MFITREEAIR

SEQ ID NO: 25057 - protein, 10 aa, Severe acute respiratory syndrome coronavirus 2
  REGION 1..10: note = Table B: HLA-DQA1*03:01-B1*03:02L
TREEAIRHVR

SEQ ID NO: 25058 - protein, 10 aa, Severe acute respiratory syndrome coronavirus 2
  REGION 1..10: note = Table B: HLA-DQA1*03:01-B1*03:02L HLA-DQA1*01:03-B1*06:01L HLA-DQA1*02:01-B1*03:03L
VGTNLPLQLG

SEQ ID NO: 25059 - protein, 12 aa, Severe acute respiratory syndrome coronavirus 2
  REGION 1..12: note = Table B: HLA-DQA1*03:01-B1*03:02L HLA-DQA1*01:03-B1*06:01L HLA-DQA1*02:01-B1*03:03L
STGVNLVAVPTG

SEQ ID NO: 25060 - protein, 11 aa, Severe acute respiratory syndrome coronavirus 2
  REGION 1..11: note = Table B: HLA-DQA1*03:01-B1*03:02L HLA-DQA1*01:03-B1*06:01L HLA-DQA1*02:01-B1*03:03L
TPNNTDFSRVS

SEQ ID NO: 25061 - protein, 11 aa, Severe acute respiratory syndrome coronavirus 2
  REGION 1..11: note = Table B: HLA-DQA1*03:01-B1*03:02L
SAKPPPGDQFK

SEQ ID NO: 25062 - protein, 10 aa, Severe acute respiratory syndrome coronavirus 2
  REGION 1..10: note = Table B: HLA-DQA1*03:01-B1*03:02L HLA-DQA1*02:01-B1*03:03L
SDTLKNLSDR

SEQ ID NO: 25063 - protein, 10 aa, Severe acute respiratory syndrome coronavirus 2
  REGION 1..10: note = Table B: HLA-DQA1*03:01-B1*03:02L HLA-DQA1*01:03-B1*06:01L HLA-DQA1*02:01-B1*03:03L
GFTGNLQSNH

SEQ ID NO: 25064 - protein, 10 aa, Severe acute respiratory syndrome coronavirus 2
  REGION 1..10: note = Table B: HLA-DQA1*03:01-B1*03:02L
TIEYPIIGDE

SEQ ID NO: 25065 - protein, 12 aa, Severe acute respiratory syndrome coronavirus 2
  REGION 1..12: note = Table B: HLA-DQA1*03:01-B1*03:02L HLA-DQA1*01:03-B1*06:01L HLA-DQA1*02:01-B1*03:03L
YDAQPCSDKAYK

SEQ ID NO: 25066 - protein, 10 aa, Severe acute respiratory syndrome coronavirus 2
  REGION 1..10: note = Table B: HLA-DQA1*03:01-B1*03:02L
ATHSDKFTDG

SEQ ID NO: 25067 - protein, 10 aa, Severe acute respiratory syndrome coronavirus 2
  REGION 1..10: note = Table B: HLA-DQA1*03:01-B1*03:02L
RYPANSIVCR

SEQ ID NO: 25068 - protein, 10 aa, Severe acute respiratory syndrome coronavirus 2
  REGION 1..10: note = Table B: HLA-DQA1*03:01-B1*03:02L HLA-DQA1*01:03-B1*06:01L
FDTRVLSNLN

SEQ ID NO: 25069 - protein, 10 aa, Severe acute respiratory syndrome coronavirus 2
  REGION 1..10: note = Table B: HLA-DQA1*03:01-B1*03:02L HLA-DQA1*01:03-B1*06:01L HLA-DQA1*02:01-B1*03:03L
DGGSLYVNKH

SEQ ID NO: 25070 - protein, 10 aa, Severe acute respiratory syndrome coronavirus 2
  REGION 1..10: note = Table B: HLA-DQA1*03:01-B1*03:02L HLA-DQA1*02:01-B1*03:03L
AFHTPAFDKS

SEQ ID NO: 25071 - protein, 12 aa, Severe acute respiratory syndrome coronavirus 2
  REGION 1..12: note = Table B: HLA-DQA1*03:01-B1*03:02L
YSDSPCESHGKQ

SEQ ID NO: 25072 - protein, 11 aa, Severe acute respiratory syndrome coronavirus 2
  REGION 1..11: note = Table B: HLA-DQA1*03:01-B1*03:02L
SHGKQVVSDID

SEQ ID NO: 25073 - protein, 13 aa, Severe acute respiratory syndrome coronavirus 2
  REGION 1..13: note = Table B: HLA-DQA1*03:01-B1*03:02L HLA-DRB1*16:01L HLA-DQA1*02:01-B1*03:03L HLA-DRB1*15:03L
AGFSLWVYKQFDT

SEQ ID NO: 25074 - protein, 11 aa, Severe acute respiratory syndrome coronavirus 2
  REGION 1..11: note = Table B: HLA-DQA1*03:01-B1*03:02L
FDGQQGEVPVS

SEQ ID NO: 25075 - protein, 10 aa, Severe acute respiratory syndrome coronavirus 2
  REGION 1..10: note = Table B: HLA-DQA1*03:01-B1*03:02L
NNTVYTKVDG

SEQ ID NO: 25076 - protein, 10 aa, Severe acute respiratory syndrome coronavirus 2
  REGION 1..10: note = Table B: HLA-DQA1*03:01-B1*03:02L
GVDVELFENK

SEQ ID NO: 25077 - protein, 10 aa, Severe acute respiratory syndrome coronavirus 2
  REGION 1..10: note = Table B: HLA-DQA1*03:01-B1*03:02L HLA-DQA1*01:03-B1*06:01L HLA-DQA1*02:01-B1*03:03L
NKTTLPVNVA

SEQ ID NO: 25078 - protein, 10 aa, Severe acute respiratory syndrome coronavirus 2
  REGION 1..10: note = Table B: HLA-DQA1*03:01-B1*03:02L
AKRNIKPVPE

SEQ ID NO: 25079 - protein, 10 aa, Severe acute respiratory syndrome coronavirus 2
  REGION 1..10: note = Table B: HLA-DQA1*03:01-B1*03:02L
RVDGQVDLFR

SEQ ID NO: 25080 - protein, 10 aa, Severe acute respiratory syndrome coronavirus 2
  REGION 1..10: note = Table B: HLA-DQA1*03:01-B1*03:02L
GQVDLFRNAR

SEQ ID NO: 25081 - protein, 10 aa, Severe acute respiratory syndrome coronavirus 2
  REGION 1..10: note = Table B: HLA-DQA1*03:01-B1*03:02L
PSVGPKQASL

SEQ ID NO: 25082 - protein, 10 aa, Severe acute respiratory syndrome coronavirus 2
  REGION 1..10: note = Table B: HLA-DQA1*03:01-B1*03:02L
AVKTQFNYYK

SEQ ID NO: 25083 - protein, 10 aa, Severe acute respiratory syndrome coronavirus 2
  REGION 1..10: note = Table B: HLA-DQA1*03:01-B1*03:02L
KKVDGVVQQL

SEQ ID NO: 25084 - protein, 11 aa, Severe acute respiratory syndrome coronavirus 2
  REGION 1..11: note = Table B: HLA-DQA1*03:01-B1*03:02L
QLPETYFTQSR

SEQ ID NO: 25085 - protein, 11 aa, Severe acute respiratory syndrome coronavirus 2
  REGION 1..11: note = Table B: HLA-DQA1*03:01-B1*03:02L HLA-DQA1*02:01-B1*03:03L
PETYFTQSRNL

SEQ ID NO: 25086 - protein, 10 aa, Severe acute respiratory syndrome coronavirus 2
  REGION 1..10: note = Table B: HLA-DQA1*03:01-B1*03:02L HLA-DPA1*01:02-B1*04:01L HLA-DQA1*02:01-B1*03:03L
TYFTQSRNLQ

SEQ ID NO: 25087 - protein, 10 aa, Severe acute respiratory syndrome coronavirus 2
  REGION 1..10: note = Table B: HLA-DQA1*03:01-B1*03:02L
SRNLQEFKPR

SEQ ID NO: 25088 - protein, 12 aa, Severe acute respiratory syndrome coronavirus 2
  REGION 1..12: note = Table B: HLA-DQA1*03:01-B1*03:02L
KPRSQMEIDFLE

SEQ ID NO: 25089 - protein, 10 aa, Severe acute respiratory syndrome coronavirus 2
  REGION 1..10: note = Table B: HLA-DQA1*03:01-B1*03:02L HLA-DPA1*01:02-B1*04:01L
YKLEGYAFEH

SEQ ID NO: 25090 - protein, 10 aa, Severe acute respiratory syndrome coronavirus 2
  REGION 1..10: note = Table B: HLA-DQA1*03:01-B1*03:02L
EHIVYGDFSH

SEQ ID NO: 25091 - protein, 11 aa, Severe acute respiratory syndrome coronavirus 2
  REGION 1..11: note = Table B: HLA-DQA1*03:01-B1*03:02L
GLHLLIGLAKR

SEQ ID NO: 25092 - protein, 10 aa, Severe acute respiratory syndrome coronavirus 2
  REGION 1..10: note = Table B: HLA-DQA1*03:01-B1*03:02L HLA-DQA1*02:01-B1*03:03L
DFIPMDSTVK

SEQ ID NO: 25093 - protein, 11 aa, Severe acute respiratory syndrome coronavirus 2
  REGION 1..11: note = Table B: HLA-DQA1*03:01-B1*03:02L HLA-DQA1*01:03-B1*06:01L
DSTVKNYFITD

SEQ ID NO: 25094 - protein, 10 aa, Severe acute respiratory syndrome coronavirus 2
  REGION 1..10: note = Table B: HLA-DQA1*03:01-B1*03:02L HLA-DQA1*01:03-B1*06:01L HLA-DQA1*02:01-B1*03:03L
SVVSKVVKVT

SEQ ID NO: 25095 - protein, 10 aa, Severe acute respiratory syndrome coronavirus 2
  REGION 1..10: note = Table B: HLA-DQA1*03:01-B1*03:02L HLA-DQA1*02:01-B1*03:03L
DGHVETFYPK

SEQ ID NO: 25096 - protein, 10 aa, Severe acute respiratory syndrome coronavirus 2
  REGION 1..10: note = Table B: HLA-DQA1*03:01-B1*03:02L
AMPNLYKMQR

SEQ ID NO: 25097 - protein, 11 aa, Severe acute respiratory syndrome coronavirus 2
  REGION 1..11: note = Table B: HLA-DQA1*03:01-B1*03:02L
LNTLTLAVPYN

SEQ ID NO: 25098 - protein, 10 aa, Severe acute respiratory syndrome coronavirus 2
  REGION 1..10: note = Table B: HLA-DQA1*03:01-B1*03:02L
AVPYNMRVIH

SEQ ID NO: 25099 - protein, 11 aa, Severe acute respiratory syndrome coronavirus 2
  REGION 1..11: note = Table B: HLA-DQA1*03:01-B1*03:02L
VPYNMRVIHFG

SEQ ID NO: 25100 - protein, 11 aa, Severe acute respiratory syndrome coronavirus 2
  REGION 1..11: note = Table B: HLA-DQA1*03:01-B1*03:02L
GAGSDKGVAPG

SEQ ID NO: 25101 - protein, 11 aa, Severe acute respiratory syndrome coronavirus 2
  REGION 1..11: note = Table B: HLA-DQA1*03:01-B1*03:02L HLA-DQA1*02:01-B1*03:03L
TAVLRQWLPTG

SEQ ID NO: 25102 - protein, 11 aa, Severe acute respiratory syndrome coronavirus 2
  REGION 1..11: note = Table B: HLA-DQA1*03:01-B1*03:02L
DPKTKNVTKEN

SEQ ID NO: 25103 - protein, 12 aa, Severe acute respiratory syndrome coronavirus 2
  REGION 1..12: note = Table B: HLA-DQA1*03:01-B1*03:02L
TKNVTKENDSKE

SEQ ID NO: 25104 - protein, 10 aa, Severe acute respiratory syndrome coronavirus 2
  REGION 1..10: note = Table B: HLA-DQA1*03:01-B1*03:02L HLA-DQA1*01:03-B1*06:01L HLA-DQA1*02:01-B1*03:03L
GSVAIKITEH

SEQ ID NO: 25105 - protein, 10 aa, Severe acute respiratory syndrome coronavirus 2
  REGION 1..10: note = Table B: HLA-DQA1*03:01-B1*03:02L HLA-DQA1*01:03-B1*06:01L HLA-DQA1*02:01-B1*03:03L
LGKPREQIDG

SEQ ID NO: 25106 - protein, 10 aa, Severe acute respiratory syndrome coronavirus 2
  REGION 1..10: note = Table B: HLA-DQA1*03:01-B1*03:02L HLA-DQA1*02:01-B1*03:03L
KLRGTAVMSL

SEQ ID NO: 25107 - protein, 10 aa, Severe acute respiratory syndrome coronavirus 2
  REGION 1..10: note = Table B: HLA-DQA1*03:01-B1*03:02L HLA-DQA1*01:03-B1*06:01L HLA-DQA1*02:01-B1*03:03L
GTAVMSLKEG

SEQ ID NO: 25108 - protein, 10 aa, Severe acute respiratory syndrome coronavirus 2
  REGION 1..10: note = Table B: HLA-DQA1*03:01-B1*03:02L
MSLKEGQIND

SEQ ID NO: 25109 - protein, 10 aa, Severe acute respiratory syndrome coronavirus 2
  REGION 1..10: note = Table B: HLA-DQA1*03:01-B1*03:02L
MILSLLSKGR

SEQ ID NO: 25110 - protein, 10 aa, Severe acute respiratory syndrome coronavirus 2
  REGION 1..10: note = Table B: HLA-DQA1*03:01-B1*03:02L
GRLIIRENNR

SEQ ID NO: 25111 - protein, 11 aa, Severe acute respiratory syndrome coronavirus 2
  REGION 1..11: note = Table B: HLA-DQA1*03:01-B1*03:02L
LPPAYTNSFTR

SEQ ID NO: 25112 - protein, 11 aa, Severe acute respiratory syndrome coronavirus 2
  REGION 1..11: note = Table B: HLA-DQA1*03:01-B1*03:02L
PPAYTNSFTRG

SEQ ID NO: 25113 - protein, 11 aa, Severe acute respiratory syndrome coronavirus 2
  REGION 1..11: note = Table B: HLA-DQA1*03:01-B1*03:02L
NSFTRGVYYPD

SEQ ID NO: 25114 - protein, 11 aa, Severe acute respiratory syndrome coronavirus 2
  REGION 1..11: note = Table B: HLA-DQA1*03:01-B1*03:02L
YPDKVFRSSVL

SEQ ID NO: 25115 - protein, 10 aa, Severe acute respiratory syndrome coronavirus 2
  REGION 1..10: note = Table B: HLA-DQA1*03:01-B1*03:02L HLA-DQA1*02:01-B1*03:03L
DGVYFASTEK

SEQ ID NO: 25116 - protein, 13 aa, Severe acute respiratory syndrome coronavirus 2
  REGION 1..13: note = Table B: HLA-DQA1*03:01-B1*03:02L
IIRGWIFGTTLDS

SEQ ID NO: 25117 - protein, 11 aa, Severe acute respiratory syndrome coronavirus 2
  REGION 1..11: note = Table B: HLA-DQA1*03:01-B1*03:02L HLA-DQA1*01:03-B1*06:01L HLA-DQA1*02:01-B1*03:03L
DSKTQSLLIVN

SEQ ID NO: 25118 - protein, 10 aa, Severe acute respiratory syndrome coronavirus 2
  REGION 1..10: note = Table B: HLA-DQA1*03:01-B1*03:02L HLA-DQA1*02:01-B1*03:03L
KTQSLLIVNN

SEQ ID NO: 25119 - protein, 11 aa, Severe acute respiratory syndrome coronavirus 2
  REGION 1..11: note = Table B: HLA-DQA1*03:01-B1*03:02L
QSLLIVNNATN

SEQ ID NO: 25120 - protein, 10 aa, Severe acute respiratory syndrome coronavirus 2
  REGION 1..10: note = Table B: HLA-DQA1*03:01-B1*03:02L
DPFLGVYYHK

SEQ ID NO: 25121 - protein, 11 aa, Severe acute respiratory syndrome coronavirus 2
  REGION 1..11: note = Table B: HLA-DQA1*03:01-B1*03:02L HLA-DQA1*01:03-B1*06:01L
NNKSWMESEFR

SEQ ID NO: 25122 - protein, 11 aa, Severe acute respiratory syndrome coronavirus 2
  REGION 1..11: note = Table B: HLA-DQA1*03:01-B1*03:02L
QPFLMDLEGKQ

SEQ ID NO: 25123 - protein, 10 aa, Severe acute respiratory syndrome coronavirus 2
  REGION 1..10: note = Table B: HLA-DQA1*03:01-B1*03:02L
DLEGKQGNFK

SEQ ID NO: 25124 - protein, 10 aa, Severe acute respiratory syndrome coronavirus 2
  REGION 1..10: note = Table B: HLA-DQA1*03:01-B1*03:02L
REFVFKNIDG

SEQ ID NO: 25125 - protein, 10 aa, Severe acute respiratory syndrome coronavirus 2
  REGION 1..10: note = Table B: HLA-DQA1*03:01-B1*03:02L
VFKNIDGYFK

SEQ ID NO: 25126 - protein, 12 aa, Severe acute respiratory syndrome coronavirus 2
  REGION 1..12: note = Table B: HLA-DQA1*03:01-B1*03:02L HLA-DQA1*02:01-B1*03:03L
LHRSYLTPGDSS

SEQ ID NO: 25127 - protein, 10 aa, Severe acute respiratory syndrome coronavirus 2
  REGION 1..10: note = Table B: HLA-DQA1*03:01-B1*03:02L
YLQPRTFLLK

SEQ ID NO: 25128 - protein, 10 aa, Severe acute respiratory syndrome coronavirus 2
  REGION 1..10: note = Table B: HLA-DQA1*03:01-B1*03:02L
SFVIRGDEVR

SEQ ID NO: 25129 - protein, 10 aa, Severe acute respiratory syndrome coronavirus 2
  REGION 1..10: note = Table B: HLA-DQA1*03:01-B1*03:02L HLA-DQA1*02:01-B1*03:03L
TGKIADYNYK

SEQ ID NO: 25130 - protein, 10 aa, Severe acute respiratory syndrome coronavirus 2
  REGION 1..10: note = Table B: HLA-DQA1*03:01-B1*03:02L HLA-DRB1*14:17L
AWNSNNLDSK

SEQ ID NO: 25131 - protein, 10 aa, Severe acute respiratory syndrome coronavirus 2
  REGION 1..10: note = Table B: HLA-DQA1*03:01-B1*03:02L
NSNNLDSKVG

SEQ ID NO: 25132 - protein, 11 aa, Severe acute respiratory syndrome coronavirus 2
  REGION 1..11: note = Table B: HLA-DQA1*03:01-B1*03:02L
DSKVGGNYNYL

SEQ ID NO: 25133 - protein, 10 aa, Severe acute respiratory syndrome coronavirus 2
  REGION 1..10: note = Table B: HLA-DQA1*03:01-B1*03:02L
VGGNYNYLYR

SEQ ID NO: 25134 - protein, 11 aa, Severe acute respiratory syndrome coronavirus 2
  REGION 1..11: note = Table B: HLA-DQA1*03:01-B1*03:02L HLA-DQA1*01:03-B1*06:01L
RDISTEIYQAG

SEQ ID NO: 25135 - protein, 12 aa, Severe acute respiratory syndrome coronavirus 2
  REGION 1..12: note = Table B: HLA-DQA1*03:01-B1*03:02L HLA-DQA1*01:03-B1*06:01L
ISTEIYQAGSTP

SEQ ID NO: 25136 - protein, 13 aa, Severe acute respiratory syndrome coronavirus 2
  REGION 1..13: note = Table B: HLA-DQA1*03:01-B1*03:02L
YQAGSTPCNGVEG

SEQ ID NO: 25137 - protein, 10 aa, Severe acute respiratory syndrome coronavirus 2
  REGION 1..10: note = Table B: HLA-DQA1*03:01-B1*03:02L
TNGVGYQPYR

SEQ ID NO: 25138 - protein, 11 aa, Severe acute respiratory syndrome coronavirus 2
  REGION 1..11: note = Table B: HLA-DQA1*03:01-B1*03:02L
GPKKSTNLVKN

SEQ ID NO: 25139 - protein, 12 aa, Severe acute respiratory syndrome coronavirus 2
  REGION 1..12: note = Table B: HLA-DQA1*03:01-B1*03:02L
VNFNFNGLTGTG

SEQ ID NO: 25140 - protein, 10 aa, Severe acute respiratory syndrome coronavirus 2
  REGION 1..10: note = Table B: HLA-DQA1*03:01-B1*03:02L HLA-DQA1*01:03-B1*06:01L HLA-DQA1*02:01-B1*03:03L
TGVLTESNKK

SEQ ID NO: 25141 - protein, 10 aa, Severe acute respiratory syndrome coronavirus 2
  REGION 1..10: note = Table B: HLA-DQA1*03:01-B1*03:02L
KFLPFQQFGR

SEQ ID NO: 25142 - protein, 14 aa, Severe acute respiratory syndrome coronavirus 2
  REGION 1..14: note = Table B: HLA-DQA1*03:01-B1*03:02L
EILDITPCSFGGVS

SEQ ID NO: 25143 - protein, 12 aa, Severe acute respiratory syndrome coronavirus 2
  REGION 1..12: note = Table B: HLA-DQA1*03:01-B1*03:02L
VSVITPGTNTSN

SEQ ID NO: 25144 - protein, 12 aa, Severe acute respiratory syndrome coronavirus 2
  REGION 1..12: note = Table B: HLA-DQA1*03:01-B1*03:02L HLA-DQA1*01:03-B1*06:01L
NTSNQVAVLYQD

SEQ ID NO: 25145 - protein, 10 aa, Severe acute respiratory syndrome coronavirus 2
  REGION 1..10: note = Table B: HLA-DQA1*03:01-B1*03:02L
HADQLTPTWR

SEQ ID NO: 25146 - protein, 10 aa, Severe acute respiratory syndrome coronavirus 2
  REGION 1..10: note = Table B: HLA-DQA1*03:01-B1*03:02L
TQTNSPRRAR

SEQ ID NO: 25147 - protein, 11 aa, Severe acute respiratory syndrome coronavirus 2
  REGION 1..11: note = Table B: HLA-DQA1*03:01-B1*03:02L
SVASQSIIAYT

SEQ ID NO: 25148 - protein, 12 aa, Severe acute respiratory syndrome coronavirus 2
  REGION 1..12: note = Table B: HLA-DQA1*03:01-B1*03:02L
GAENSVAYSNNS

SEQ ID NO: 25149 - protein, 10 aa, Severe acute respiratory syndrome coronavirus 2
  REGION 1..10: note = Table B: HLA-DQA1*03:01-B1*03:02L HLA-DQA1*01:03-B1*06:01L HLA-DQA1*02:01-B1*03:03L
NSIAIPTNFT

SEQ ID NO: 25150 - protein, 10 aa, Severe acute respiratory syndrome coronavirus 2
  REGION 1..10: note = Table B: HLA-DQA1*03:01-B1*03:02L HLA-DQA1*01:03-B1*06:01L HLA-DQA1*02:01-B1*03:03L
SVTTEILPVS

SEQ ID NO: 25151 - protein, 10 aa, Severe acute respiratory syndrome coronavirus 2
  REGION 1..10: note = Table B: HLA-DQA1*03:01-B1*03:02L HLA-DQA1*01:03-B1*06:01L HLA-DQA1*02:01-B1*03:03L
ALTGIAVEQD

SEQ ID NO: 25152 - protein, 10 aa, Severe acute respiratory syndrome coronavirus 2
  REGION 1..10: note = Table B: HLA-DQA1*03:01-B1*03:02L
GIAVEQDKNT

SEQ ID NO: 25153 - protein, 10 aa, Severe acute respiratory syndrome coronavirus 2
  REGION 1..10: note = Table B: HLA-DQA1*03:01-B1*03:02L
VFAQVKQIYK

SEQ ID NO: 25154 - protein, 10 aa, Severe acute respiratory syndrome coronavirus 2
  REGION 1..10: note = Table B: HLA-DQA1*03:01-B1*03:02L
FSQILPDPSK

SEQ ID NO: 25155 - protein, 11 aa, Severe acute respiratory syndrome coronavirus 2
  REGION 1..11: note = Table B: HLA-DQA1*03:01-B1*03:02L HLA-DQA1*01:03-B1*06:01L
LADAGFIKQYG

SEQ ID NO: 25156 - protein, 12 aa, Severe acute respiratory syndrome coronavirus 2
  REGION 1..12: note = Table B: HLA-DQA1*03:01-B1*03:02L
GDCLGDIAARDL

SEQ ID NO: 25157 - protein, 13 aa, Severe acute respiratory syndrome coronavirus 2
  REGION 1..13: note = Table B: HLA-DQA1*03:01-B1*03:02L
GDIAARDLICAQK

SEQ ID NO: 25158 - protein, 10 aa, Severe acute respiratory syndrome coronavirus 2
  REGION 1..10: note = Table B: HLA-DQA1*03:01-B1*03:02L
TVLPPLLTDE

SEQ ID NO: 25159 - protein, 10 aa, Severe acute respiratory syndrome coronavirus 2
  REGION 1..10: note = Table B: HLA-DQA1*03:01-B1*03:02L HLA-DQA1*01:03-B1*06:01L HLA-DQA1*02:01-B1*03:03L
AALQIPFAMQ

SEQ ID NO: 25160 - protein, 10 aa, Severe acute respiratory syndrome coronavirus 2
  REGION 1..10: note = Table B: HLA-DQA1*03:01-B1*03:02L
IPFAMQMAYR

SEQ ID NO: 25161 - protein, 10 aa, Severe acute respiratory syndrome coronavirus 2
  REGION 1..10: note = Table B: HLA-DQA1*03:01-B1*03:02L HLA-DQA1*02:01-B1*03:03L
TQNVLYENQK

SEQ ID NO: 25162 - protein, 10 aa, Severe acute respiratory syndrome coronavirus 2
  REGION 1..10: note = Table B: HLA-DQA1*03:01-B1*03:02L
ANQFNSAIGK

SEQ ID NO: 25163 - protein, 10 aa, Severe acute respiratory syndrome coronavirus 2
  REGION 1..10: note = Table B: HLA-DQA1*03:01-B1*03:02L
RLDKVEAEVQ

SEQ ID NO: 25164 - protein, 11 aa, Severe acute respiratory syndrome coronavirus 2
  REGION 1..11: note = Table B: HLA-DQA1*03:01-B1*03:02L
LDKVEAEVQID

SEQ ID NO: 25165 - protein, 10 aa, Severe acute respiratory syndrome coronavirus 2
  REGION 1..10: note = Table B: HLA-DQA1*03:01-B1*03:02L HLA-DQA1*02:01-B1*03:03L
KVEAEVQIDR

SEQ ID NO: 25166 - protein, 10 aa, Severe acute respiratory syndrome coronavirus 2
  REGION 1..10: note = Table B: HLA-DQA1*03:01-B1*03:02L HLA-DQA1*02:01-B1*03:03L
EVQIDRLITG

SEQ ID NO: 25167 - protein, 10 aa, Severe acute respiratory syndrome coronavirus 2
  REGION 1..10: note = Table B: HLA-DQA1*03:01-B1*03:02L HLA-DQA1*02:01-B1*03:03L
IDRLITGRLQ

SEQ ID NO: 25168 - protein, 11 aa, Severe acute respiratory syndrome coronavirus 2
  REGION 1..11: note = Table B: HLA-DQA1*03:01-B1*03:02L HLA-DQA1*01:03-B1*06:01L HLA-DQA1*02:01-B1*03:03L
TQQLIRAAEIR

SEQ ID NO: 25169 - protein, 10 aa, Severe acute respiratory syndrome coronavirus 2
  REGION 1..10: note = Table B: HLA-DQA1*03:01-B1*03:02L HLA-DQA1*02:01-B1*03:03L
DGKAHFPREG

SEQ ID NO: 25170 - protein, 10 aa, Severe acute respiratory syndrome coronavirus 2
  REGION 1..10: note = Table B: HLA-DQA1*03:01-B1*03:02L HLA-DQA1*02:01-B1*03:03L
EGVFVSNGTH

SEQ ID NO: 25171 - protein, 10 aa, Severe acute respiratory syndrome coronavirus 2
  REGION 1..10: note = Table B: HLA-DQA1*03:01-B1*03:02L
NGTHWFVTQR

SEQ ID NO: 25172 - protein, 10 aa, Severe acute respiratory syndrome coronavirus 2
  REGION 1..10: note = Table B: HLA-DQA1*03:01-B1*03:02L
YEPQIITTDN

SEQ ID NO: 25173 - protein, 11 aa, Severe acute respiratory syndrome coronavirus 2
  REGION 1..11: note = Table B: HLA-DQA1*03:01-B1*03:02L
DKYFKNHTSPD

SEQ ID NO: 25174 - protein, 12 aa, Severe acute respiratory syndrome coronavirus 2
  REGION 1..12: note = Table B: HLA-DQA1*03:01-B1*03:02L
HTSPDVDLGDIS

SEQ ID NO: 25175 - protein, 10 aa, Severe acute respiratory syndrome coronavirus 2
  REGION 1..10: note = Table B: HLA-DQA1*03:01-B1*03:02L
RLNEVAKNLN

SEQ ID NO: 25176 - protein, 11 aa, Severe acute respiratory syndrome coronavirus 2
  REGION 1..11: note = Table B: HLA-DQA1*03:01-B1*03:02L
VAKNLNESLID

SEQ ID NO: 25177 - protein, 10 aa, Severe acute respiratory syndrome coronavirus 2
  REGION 1..10: note = Table B: HLA-DQA1*03:01-B1*03:02L
IDLQELGKYE

SEQ ID NO: 25178 - protein, 10 aa, Severe acute respiratory syndrome coronavirus 2
  REGION 1..10: note = Table B: HLA-DQA1*03:01-B1*03:02L HLA-DQA1*02:01-B1*03:03L
DSEPVLKGVK

SEQ ID NO: 25179 - protein, 10 aa, Severe acute respiratory syndrome coronavirus 2
  REGION 1..10: note = Table B: HLA-DQA1*03:01-B1*03:02L
VTLKQGEIKD

SEQ ID NO: 25180 - protein, 10 aa, Severe acute respiratory syndrome coronavirus 2
  REGION 1..10: note = Table B: HLA-DQA1*03:01-B1*03:02L
KDATPSDFVR

SEQ ID NO: 25181 - protein, 10 aa, Severe acute respiratory syndrome coronavirus 2
  REGION 1..10: note = Table B: HLA-DQA1*03:01-B1*03:02L HLA-DQA1*01:03-B1*06:01L HLA-DQA1*02:01-B1*03:03L
ATPSDFVRAT

SEQ ID NO: 25182 - protein, 10 aa, Severe acute respiratory syndrome coronavirus 2
  REGION 1..10: note = Table B: HLA-DQA1*03:01-B1*03:02L
IPIQASLPFG

SEQ ID NO: 25183 - protein, 10 aa, Severe acute respiratory syndrome coronavirus 2
  REGION 1..10: note = Table B: HLA-DQA1*03:01-B1*03:02L
ASKIITLKKR

SEQ ID NO: 25184 - protein, 12 aa, Severe acute respiratory syndrome coronavirus 2
  REGION 1..12: note = Table B: HLA-DQA1*03:01-B1*03:02L
SKNPLLYDANYF

SEQ ID NO: 25185 - protein, 11 aa, Severe acute respiratory syndrome coronavirus 2
  REGION 1..11: note = Table B: HLA-DQA1*03:01-B1*03:02L
GYTEKWESGVK

SEQ ID NO: 25186 - protein, 11 aa, Severe acute respiratory syndrome coronavirus 2
  REGION 1..11: note = Table B: HLA-DQA1*03:01-B1*03:02L HLA-DQA1*01:03-B1*06:01L HLA-DQA1*02:01-B1*03:03L
LYSTQLSTDTG

SEQ ID NO: 25187 - protein, 10 aa, Severe acute respiratory syndrome coronavirus 2
  REGION 1..10: note = Table B: HLA-DQA1*03:01-B1*03:02L
EHVTFFIYNK

SEQ ID NO: 25188 - protein, 12 aa, Severe acute respiratory syndrome coronavirus 2
  REGION 1..12: note = Table B: HLA-DQA1*03:01-B1*03:02L
VDEPEEHVQIHT

SEQ ID NO: 25189 - protein, 10 aa, Severe acute respiratory syndrome coronavirus 2
  REGION 1..10: note = Table B: HLA-DQA1*03:01-B1*03:02L
EHVQIHTIDG

SEQ ID NO: 25190 - protein, 11 aa, Severe acute respiratory syndrome coronavirus 2
  REGION 1..11: note = Table B: HLA-DQA1*03:01-B1*03:02L
SSGVVNPVMEP

SEQ ID NO: 25191 - protein, 11 aa, Severe acute respiratory syndrome coronavirus 2
  REGION 1..11: note = Table B: HLA-DQA1*03:01-B1*03:02L
VVNPVMEPIYD

SEQ ID NO: 25192 - protein, 11 aa, Severe acute respiratory syndrome coronavirus 2
  REGION 1..11: note = Table B: HLA-DQA1*03:01-B1*03:02L HLA-DPA1*01:02-B1*04:01L
LVKPSFYVYSR

SEQ ID NO: 25193 - protein, 10 aa, Severe acute respiratory syndrome coronavirus 2
  REGION 1..10: note = Table B: HLA-DQA1*03:01-B1*03:02L
SRVKNLNSSR

SEQ ID NO: 25194 - protein, 10 aa, Severe acute respiratory syndrome coronavirus 2
  REGION 1..10: note = Table B: HLA-DQA1*03:01-B1*03:02L
ASFRLFARTR

SEQ ID NO: 25195 - protein, 10 aa, Severe acute respiratory syndrome coronavirus 2
  REGION 1..10: note = Table B: HLA-DQA1*03:01-B1*03:02L HLA-DQA1*01:03-B1*06:01L HLA-DQA1*02:01-B1*03:03L
GAVILRGHLR

SEQ ID NO: 25196 - protein, 10 aa, Severe acute respiratory syndrome coronavirus 2
  REGION 1..10: note = Table B: HLA-DQA1*03:01-B1*03:02L
PKEITVATSR

SEQ ID NO: 25197 - protein, 10 aa, Severe acute respiratory syndrome coronavirus 2
  REGION 1..10: note = Table B: HLA-DQA1*03:01-B1*03:02L
ATSRTLSYYK

SEQ ID NO: 25198 - protein, 10 aa, Severe acute respiratory syndrome coronavirus 2
  REGION 1..10: note = Table B: HLA-DQA1*03:01-B1*03:02L
ASQRVAGDSG

SEQ ID NO: 25199 - protein, 10 aa, Severe acute respiratory syndrome coronavirus 2
  REGION 1..10: note = Table B: HLA-DQA1*03:01-B1*03:02L HLA-DQA1*02:01-B1*03:03L
GDSGFAAYSR

SEQ ID NO: 25200 - protein, 10 aa, Severe acute respiratory syndrome coronavirus 2
  REGION 1..10: note = Table B: HLA-DQA1*03:01-B1*03:02L
IGNYKLNTDH

SEQ ID NO: 25201 - protein, 10 aa, Severe acute respiratory syndrome coronavirus 2
  REGION 1..10: note = Table B: HLA-DQA1*03:01-B1*03:02L
NLSKSLTENK

SEQ ID NO: 25202 - protein, 12 aa, Severe acute respiratory syndrome coronavirus 2
  REGION 1..12: note = Table B: HLA-DQA1*03:01-B1*03:02L
LSKSLTENKYSQ

SEQ ID NO: 25203 - protein, 12 aa, Severe acute respiratory syndrome coronavirus 2
  REGION 1..12: note = Table B: HLA-DQA1*03:01-B1*03:02L
TENKYSQLDEEQ

SEQ ID NO: 25204 - protein, 10 aa, Severe acute respiratory syndrome coronavirus 2
  REGION 1..10: note = Table B: HLA-DQA1*03:01-B1*03:02L
GTYEGNSPFH

SEQ ID NO: 25205 - protein, 10 aa, Severe acute respiratory syndrome coronavirus 2
  REGION 1..10: note = Table B: HLA-DQA1*03:01-B1*03:02L HLA-DQA1*02:01-B1*03:03L
NSPFHPLADN

SEQ ID NO: 25206 - protein, 11 aa, Severe acute respiratory syndrome coronavirus 2
  REGION 1..11: note = Table B: HLA-DQA1*03:01-B1*03:02L
PFHPLADNKFA

SEQ ID NO: 25207 - protein, 13 aa, Severe acute respiratory syndrome coronavirus 2
  REGION 1..13: note = Table B: HLA-DQA1*03:01-B1*03:02L HLA-DQA1*02:01-B1*03:03L
YSKWYIRVGARKS

SEQ ID NO: 25208 - protein, 11 aa, Severe acute respiratory syndrome coronavirus 2
  REGION 1..11: note = Table B: HLA-DQA1*03:01-B1*03:02L
VGARKSAPLIE

SEQ ID NO: 25209 - protein, 12 aa, Severe acute respiratory syndrome coronavirus 2
  REGION 1..12: note = Table B: HLA-DQA1*03:01-B1*03:02L
GSKSPIQYIDIG

SEQ ID NO: 25210 - protein, 12 aa, Severe acute respiratory syndrome coronavirus 2
  REGION 1..12: note = Table B: HLA-DQA1*03:01-B1*03:02L HLA-DQA1*02:01-B1*03:03L
SKSPIQYIDIGN

SEQ ID NO: 25211 - protein, 12 aa, Severe acute respiratory syndrome coronavirus 2
  REGION 1..12: note = Table B: HLA-DQA1*03:01-B1*03:02L
SDNGPQNQRNAP

SEQ ID NO: 25212 - protein, 13 aa, Severe acute respiratory syndrome coronavirus 2
  REGION 1..13: note = Table B: HLA-DQA1*03:01-B1*03:02L
FGGPSDSTGSNQN

SEQ ID NO: 25213 - protein, 11 aa, Severe acute respiratory syndrome coronavirus 2
  REGION 1..11: note = Table B: HLA-DQA1*03:01-B1*03:02L
GERSGARSKQR

SEQ ID NO: 25214 - protein, 14 aa, Severe acute respiratory syndrome coronavirus 2
  REGION 1..14: note = Table B: HLA-DQA1*03:01-B1*03:02L
LPNNTASWFTALTQ

SEQ ID NO: 25215 - protein, 13 aa, Severe acute respiratory syndrome coronavirus 2
  REGION 1..13: note = Table B: HLA-DQA1*03:01-B1*03:02L
TQHGKEDLKFPRG

SEQ ID NO: 25216 - protein, 13 aa, Severe acute respiratory syndrome coronavirus 2
  REGION 1..13: note = Table B: HLA-DQA1*03:01-B1*03:02L HLA-DRB1*14:17L
GQGVPINTNSSPD

SEQ ID NO: 25217 - protein, 11 aa, Severe acute respiratory syndrome coronavirus 2
  REGION 1..11: note = Table B: HLA-DQA1*03:01-B1*03:02L
DQIGYYRRATR

SEQ ID NO: 25218 - protein, 10 aa, Severe acute respiratory syndrome coronavirus 2
  REGION 1..10: note = Table B: HLA-DQA1*03:01-B1*03:02L
RIRGGDGKMK

SEQ ID NO: 25219 - protein, 11 aa, Severe acute respiratory syndrome coronavirus 2
  REGION 1..11: note = Table B: HLA-DQA1*03:01-B1*03:02L
GTGPEAGLPYG

SEQ ID NO: 25220 - protein, 11 aa, Severe acute respiratory syndrome coronavirus 2
  REGION 1..11: note = Table B: HLA-DQA1*03:01-B1*03:02L
PEAGLPYGANK

SEQ ID NO: 25221 - protein, 10 aa, Severe acute respiratory syndrome coronavirus 2
  REGION 1..10: note = Table B: HLA-DQA1*03:01-B1*03:02L
NTPKDHIGTR

SEQ ID NO: 25222 - protein, 12 aa, Severe acute respiratory syndrome coronavirus 2
  REGION 1..12: note = Table B: HLA-DQA1*03:01-B1*03:02L
TPKDHIGTRNPA

SEQ ID NO: 25223 - protein, 10 aa, Severe acute respiratory syndrome coronavirus 2
  REGION 1..10: note = Table B: HLA-DQA1*03:01-B1*03:02L
DHIGTRNPAN

SEQ ID NO: 25224 - protein, 12 aa, Severe acute respiratory syndrome coronavirus 2
  REGION 1..12: note = Table B: HLA-DQA1*03:01-B1*03:02L
RNPANNAAIVLQ

SEQ ID NO: 25225 - protein, 11 aa, Severe acute respiratory syndrome coronavirus 2
  REGION 1..11: note = Table B: HLA-DQA1*03:01-B1*03:02L
LPKGFYAEGSR

SEQ ID NO: 25226 - protein, 10 aa, Severe acute respiratory syndrome coronavirus 2
  REGION 1..10: note = Table B: HLA-DQA1*03:01-B1*03:02L
SRGGSQASSR

SEQ ID NO: 25227 - protein, 10 aa, Severe acute respiratory syndrome coronavirus 2
  REGION 1..10: note = Table B: HLA-DQA1*03:01-B1*03:02L
SQASSRSSSR

SEQ ID NO: 25228 - protein, 10 aa, Severe acute respiratory syndrome coronavirus 2
  REGION 1..10: note = Table B: HLA-DQA1*03:01-B1*03:02L
GSSRGTSPAR

SEQ ID NO: 25229 - protein, 10 aa, Severe acute respiratory syndrome coronavirus 2
  REGION 1..10: note = Table B: HLA-DQA1*03:01-B1*03:02L
NQLESKMSGK

SEQ ID NO: 25230 - protein, 12 aa, Severe acute respiratory syndrome coronavirus 2
  REGION 1..12: note = Table B: HLA-DQA1*03:01-B1*03:02L
GKGQQQQGQTVT

SEQ ID NO: 25231 - protein, 11 aa, Severe acute respiratory syndrome coronavirus 2
  REGION 1..11: note = Table B: HLA-DQA1*03:01-B1*03:02L
VTKKSAAEASK

SEQ ID NO: 25232 - protein, 12 aa, Severe acute respiratory syndrome coronavirus 2
  REGION 1..12: note = Table B: HLA-DQA1*03:01-B1*03:02L
TKKSAAEASKKP

SEQ ID NO: 25233 - protein, 10 aa, Severe acute respiratory syndrome coronavirus 2
  REGION 1..10: note = Table B: HLA-DQA1*03:01-B1*03:02L
AAEASKKPRQ

SEQ ID NO: 25234 - protein, 10 aa, Severe acute respiratory syndrome coronavirus 2
  REGION 1..10: note = Table B: HLA-DQA1*03:01-B1*03:02L
DQELIRQGTD

SEQ ID NO: 25235 - protein, 13 aa, Severe acute respiratory syndrome coronavirus 2
  REGION 1..13: note = Table B: HLA-DQA1*03:01-B1*03:02L
FGMSRIGMEVTPS

SEQ ID NO: 25236 - protein, 10 aa, Severe acute respiratory syndrome coronavirus 2
  REGION 1..10: note = Table B: HLA-DQA1*03:01-B1*03:02L
KLDDKDPNFK

SEQ ID NO: 25237 - protein, 10 aa, Severe acute respiratory syndrome coronavirus 2
  REGION 1..10: note = Table B: HLA-DQA1*03:01-B1*03:02L
DDKDPNFKDQ

SEQ ID NO: 25238 - protein, 10 aa, Severe acute respiratory syndrome coronavirus 2
  REGION 1..10: note = Table B: HLA-DQA1*03:01-B1*03:02L
QVILLNKHID

SEQ ID NO: 25239 - protein, 10 aa, Severe acute respiratory syndrome coronavirus 2
  REGION 1..10: note = Table B: HLA-DQA1*03:01-B1*03:02L
TFPPTEPKKD

SEQ ID NO: 25240 - protein, 10 aa, Severe acute respiratory syndrome coronavirus 2
  REGION 1..10: note = Table B: HLA-DQA1*03:01-B1*03:02L
FPPTEPKKDK

SEQ ID NO: 25241 - protein, 10 aa, Severe acute respiratory syndrome coronavirus 2
  REGION 1..10: note = Table B: HLA-DQA1*03:01-B1*03:02L
VTLLPAADLD

SEQ ID NO: 25242 - protein, 10 aa, Severe acute respiratory syndrome coronavirus 2
  REGION 1..10: note = Table B: HLA-DQA1*03:01-B1*03:02L
TLLPAADLDD

SEQ ID NO: 25243 - protein, 12 aa, Severe acute respiratory syndrome coronavirus 2
  REGION 1..12: note = Table B: HLA-DQA1*03:01-B1*03:02L
LQQSMSSADSTQ

SEQ ID NO: 25244 - protein, 12 aa, Severe acute respiratory syndrome coronavirus 2
  REGION 1..12: note = Table B: HLA-DRB1*14:54L
DSIIIGGAKLKA

SEQ ID NO: 25245 - protein, 13 aa, Severe acute respiratory syndrome coronavirus 2
  REGION 1..13: note = Table B: HLA-DRB1*14:54L
GGGVAGALNKATN

SEQ ID NO: 25246 - protein, 12 aa, Severe acute respiratory syndrome coronavirus 2
  REGION 1..12: note = Table B: HLA-DRB1*14:54L
EQKIAEIPKEEV

SEQ ID NO: 25247 - protein, 12 aa, Severe acute respiratory syndrome coronavirus 2
  REGION 1..12: note = Table B: HLA-DRB1*14:54L HLA-DRB1*16:01L
ASLINTLNDLNE

SEQ ID NO: 25248 - protein, 12 aa, Severe acute respiratory syndrome coronavirus 2
  REGION 1..12: note = Table B: HLA-DRB1*14:54L
NAQVAKSHNIAL

SEQ ID NO: 25249 - protein, 11 aa, Severe acute respiratory syndrome coronavirus 2
  REGION 1..11: note = Table B: HLA-DRB1*14:54L
VLTLDNQDLNG

SEQ ID NO: 25250 - protein, 15 aa, Severe acute respiratory syndrome coronavirus 2
  REGION 1..15: note = Table B: HLA-DRB1*14:54L
YDYYRYNLPTMCDIR

SEQ ID NO: 25251 - protein, 11 aa, Severe acute respiratory syndrome coronavirus 2
  REGION 1..11: note = Table B: HLA-DRB1*14:54L
TVVIGTSKFYG

SEQ ID NO: 25252 - protein, 13 aa, Severe acute respiratory syndrome coronavirus 2
  REGION 1..13: note = Table B: HLA-DRB1*14:54L
GSLYVKPGGTSSG

SEQ ID NO: 25253 - protein, 11 aa, Severe acute respiratory syndrome coronavirus 2
  REGION 1..11: note = Table B: HLA-DRB1*14:54L
HVISTSHKLVL

SEQ ID NO: 25254 - protein, 11 aa, Severe acute respiratory syndrome coronavirus 2
  REGION 1..11: note = Table B: HLA-DRB1*14:54L
VISTSHKLVLS

SEQ ID NO: 25255 - protein, 11 aa, Severe acute respiratory syndrome coronavirus 2
  REGION 1..11: note = Table B: HLA-DRB1*14:54L
SALVYDNKLKA

SEQ ID NO: 25256 - protein, 13 aa, Severe acute respiratory syndrome coronavirus 2
  REGION 1..13: note = Table B: HLA-DRB1*14:54L
VDGVVQQLPETYF

SEQ ID NO: 25257 - protein, 12 aa, Severe acute respiratory syndrome coronavirus 2
  REGION 1..12: note = Table B: HLA-DRB1*14:54L
GVVQQLPETYFT

SEQ ID NO: 25258 - protein, 12 aa, Severe acute respiratory syndrome coronavirus 2
  REGION 1..12: note = Table B: HLA-DRB1*14:54L
TGVLTESNKKFL

SEQ ID NO: 25259 - protein, 12 aa, Severe acute respiratory syndrome coronavirus 2
  REGION 1..12: note = Table B: HLA-DRB1*14:54L
ADQLTPTWRVYS

SEQ ID NO: 25260 - protein, 12 aa, Severe acute respiratory syndrome coronavirus 2
  REGION 1..12: note = Table B: HLA-DRB1*14:54L
QEVFAQVKQIYK

SEQ ID NO: 25261 - protein, 12 aa, Severe acute respiratory syndrome coronavirus 2
  REGION 1..12: note = Table B: HLA-DRB1*14:54L
NGIGVTQNVLYE

SEQ ID NO: 25262 - protein, 12 aa, Severe acute respiratory syndrome coronavirus 2
  REGION 1..12: note = Table B: HLA-DRB1*14:54L
AQALNTLVKQLS

SEQ ID NO: 25263 - protein, 14 aa, Severe acute respiratory syndrome coronavirus 2
  REGION 1..14: note = Table B: HLA-DPA1*01:03-B1*02:01L
FKLVNKFLALCADS

SEQ ID NO: 25264 - protein, 17 aa, Severe acute respiratory syndrome coronavirus 2
  REGION 1..17: note = Table B: HLA-DPA1*01:03-B1*02:01L HLA-DRB1*04:08L
TPVCINGLMLLEIKDTE

SEQ ID NO: 25265 - protein, 16 aa, Severe acute respiratory syndrome coronavirus 2
  REGION 1..16: note = Table B: HLA-DPA1*01:03-B1*02:01L
APNMMVTNNTFTLKGG

SEQ ID NO: 25266 - protein, 19 aa, Severe acute respiratory syndrome coronavirus 2
  REGION 1..19: note = Table B: HLA-DPA1*01:03-B1*02:01L
VKPTVVVNAANVYLKHGGG

SEQ ID NO: 25267 - protein, 16 aa, Severe acute respiratory syndrome coronavirus 2
  REGION 1..16: note = Table B: HLA-DPA1*01:03-B1*02:01L
LAPLLSAGIFGADPIH

SEQ ID NO: 25268 - protein, 16 aa, Severe acute respiratory syndrome coronavirus 2
  REGION 1..16: note = Table B: HLA-DPA1*01:03-B1*02:01L
APLLSAGIFGADPIHS

SEQ ID NO: 25269 - protein, 14 aa, Severe acute respiratory syndrome coronavirus 2
  REGION 1..14: note = Table B: HLA-DPA1*01:03-B1*02:01L
AVFDKNLYDKLVSS

SEQ ID NO: 25270 - protein, 14 aa, Severe acute respiratory syndrome coronavirus 2
  REGION 1..14: note = Table B: HLA-DPA1*01:03-B1*02:01L
YDKLVSSFLEMKSE

SEQ ID NO: 25271 - protein, 18 aa, Severe acute respiratory syndrome coronavirus 2
  REGION 1..18: note = Table B: HLA-DPA1*01:03-B1*02:01L
VVDYGARFYFYTSKTTVA

SEQ ID NO: 25272 - protein, 13 aa, Severe acute respiratory syndrome coronavirus 2
  REGION 1..13: note = Table B: HLA-DPA1*01:03-B1*02:01L HLA-DPA1*01:03-B1*104:01L
VFTTVDNINLHTQ

SEQ ID NO: 25273 - protein, 17 aa, Severe acute respiratory syndrome coronavirus 2
  REGION 1..17: note = Table B: HLA-DPA1*01:03-B1*02:01L
TALLTLQQIELKFNPPA

SEQ ID NO: 25274 - protein, 17 aa, Severe acute respiratory syndrome coronavirus 2
  REGION 1..17: note = Table B: HLA-DPA1*01:03-B1*02:01L
GVEAVMYMGTLSYEQFK

SEQ ID NO: 25275 - protein, 12 aa, Severe acute respiratory syndrome coronavirus 2
  REGION 1..12: note = Table B: HLA-DPA1*01:03-B1*02:01L
SYTTTIKPVTYK

SEQ ID NO: 25276 - protein, 19 aa, Severe acute respiratory syndrome coronavirus 2
  REGION 1..19: note = Table B: HLA-DPA1*01:03-B1*02:01L
KPIVWHVNNATNKATYKPN

SEQ ID NO: 25277 - protein, 13 aa, Severe acute respiratory syndrome coronavirus 2
  REGION 1..13: note = Table B: HLA-DPA1*01:03-B1*02:01L
AYVDNSSLTIKKP

SEQ ID NO: 25278 - protein, 13 aa, Severe acute respiratory syndrome coronavirus 2
  REGION 1..13: note = Table B: HLA-DPA1*01:03-B1*02:01L
NKVVSTTTNIVTR

SEQ ID NO: 25279 - protein, 13 aa, Severe acute respiratory syndrome coronavirus 2
  REGION 1..13: note = Table B: HLA-DPA1*01:03-B1*02:01L
GGSYTNDKACPLI

SEQ ID NO: 25280 - protein, 15 aa, Severe acute respiratory syndrome coronavirus 2
  REGION 1..15: note = Table B: HLA-DPA1*01:03-B1*02:01L
AVNLLTNMFTPLIQP

SEQ ID NO: 25281 - protein, 14 aa, Severe acute respiratory syndrome coronavirus 2
  REGION 1..14: note = Table B: HLA-DPA1*01:03-B1*02:01L
FLLNKEMYLKLRSD

SEQ ID NO: 25282 - protein, 15 aa, Severe acute respiratory syndrome coronavirus 2
  REGION 1..15: note = Table B: HLA-DPA1*01:03-B1*02:01L
QSGFRKMAFPSGKVE

SEQ ID NO: 25283 - protein, 13 aa, Severe acute respiratory syndrome coronavirus 2
  REGION 1..13: note = Table B: HLA-DPA1*01:03-B1*02:01L
GDRWFLNRFTTTL

SEQ ID NO: 25284 - protein, 15 aa, Severe acute respiratory syndrome coronavirus 2
  REGION 1..15: note = Table B: HLA-DPA1*01:03-B1*02:01L
SALLEDEFTPFDVVR

SEQ ID NO: 25285 - protein, 19 aa, Severe acute respiratory syndrome coronavirus 2
  REGION 1..19: note = Table B: HLA-DPA1*01:03-B1*02:01L
DDGARRVWTLMNVLTLVYK

SEQ ID NO: 25286 - protein, 15 aa, Severe acute respiratory syndrome coronavirus 2
  REGION 1..15: note = Table B: HLA-DPA1*01:03-B1*02:01L
AAKLMVVIPDYNTYK

SEQ ID NO: 25287 - protein, 16 aa, Severe acute respiratory syndrome coronavirus 2
  REGION 1..16: note = Table B: HLA-DPA1*01:03-B1*02:01L
ANSAVKLQNNELSPVA

SEQ ID NO: 25288 - protein, 17 aa, Severe acute respiratory syndrome coronavirus 2
  REGION 1..17: note = Table B: HLA-DPA1*01:03-B1*02:01L HLA-DPA1*01:03-B1*104:01L
EERLKLFDRYFKYWDQT

SEQ ID NO: 25289 - protein, 16 aa, Severe acute respiratory syndrome coronavirus 2
  REGION 1..16: note = Table B: HLA-DPA1*01:03-B1*02:01L HLA-DPA1*01:03-B1*104:01L
FNVLFSTVFPPTSFGP

SEQ ID NO: 25290 - protein, 18 aa, Severe acute respiratory syndrome coronavirus 2
  REGION 1..18: note = Table B: HLA-DPA1*01:03-B1*02:01L
DGNAAISDYDYYRYNLPT

SEQ ID NO: 25291 - protein, 12 aa, Severe acute respiratory syndrome coronavirus 2
  REGION 1..12: note = Table B: HLA-DPA1*01:03-B1*02:01L HLA-DRB1*04:08L
AYANSVFNICQA

SEQ ID NO: 25292 - protein, 12 aa, Severe acute respiratory syndrome coronavirus 2
  REGION 1..12: note = Table B: HLA-DPA1*01:03-B1*02:01L
KLFAAETLKATE

SEQ ID NO: 25293 - protein, 12 aa, Severe acute respiratory syndrome coronavirus 2
  REGION 1..12: note = Table B: HLA-DPA1*01:03-B1*02:01L
NYVFTGYRVTKN

SEQ ID NO: 25294 - protein, 16 aa, Severe acute respiratory syndrome coronavirus 2
  REGION 1..16: note = Table B: HLA-DPA1*01:03-B1*02:01L
VFTGYRVTKNSKVQIG

SEQ ID NO: 25295 - protein, 14 aa, Severe acute respiratory syndrome coronavirus 2
  REGION 1..14: note = Table B: HLA-DPA1*01:03-B1*02:01L HLA-DRB1*16:01L HLA-DRB1*04:08L
KLNVGDYFVLTSHT

SEQ ID NO: 25296 - protein, 13 aa, Severe acute respiratory syndrome coronavirus 2
  REGION 1..13: note = Table B: HLA-DPA1*01:03-B1*02:01L
FAIGLALYYPSAR

SEQ ID NO: 25297 - protein, 15 aa, Severe acute respiratory syndrome coronavirus 2
  REGION 1..15: note = Table B: HLA-DPA1*01:03-B1*02:01L
VNSTLEQYVFCTVNA

SEQ ID NO: 25298 - protein, 12 aa, Severe acute respiratory syndrome coronavirus 2
  REGION 1..12: note = Table B: HLA-DPA1*01:03-B1*02:01L
TLEPEYFNSVCR

SEQ ID NO: 25299 - protein, 14 aa, Severe acute respiratory syndrome coronavirus 2
  REGION 1..14: note = Table B: HLA-DPA1*01:03-B1*02:01L HLA-DRB1*08:02L
YDYVIFTQTTETAH

SEQ ID NO: 25300 - protein, 13 aa, Severe acute respiratory syndrome coronavirus 2
  REGION 1..13: note = Table B: HLA-DPA1*01:03-B1*02:01L HLA-DPA1*01:02-B1*04:01L
YVIFTQTTETAHS

SEQ ID NO: 25301 - protein, 13 aa, Severe acute respiratory syndrome coronavirus 2
  REGION 1..13: note = Table B: HLA-DPA1*01:03-B1*02:01L
LELAMDEFIERYK

SEQ ID NO: 25302 - protein, 14 aa, Severe acute respiratory syndrome coronavirus 2
  REGION 1..14: note = Table B: HLA-DPA1*01:03-B1*02:01L
MDEFIERYKLEGYA

SEQ ID NO: 25303 - protein, 14 aa, Severe acute respiratory syndrome coronavirus 2
  REGION 1..14: note = Table B: HLA-DPA1*01:03-B1*02:01L
EISFMLWCKDGHVE

SEQ ID NO: 25304 - protein, 14 aa, Severe acute respiratory syndrome coronavirus 2
  REGION 1..14: note = Table B: HLA-DPA1*01:03-B1*02:01L
IFWRNTNPIQLSSY

SEQ ID NO: 25305 - protein, 16 aa, Severe acute respiratory syndrome coronavirus 2
  REGION 1..16: note = Table B: HLA-DPA1*01:03-B1*02:01L
LPFNDGVYFASTEKSN

SEQ ID NO: 25306 - protein, 13 aa, Severe acute respiratory syndrome coronavirus 2
  REGION 1..13: note = Table B: HLA-DPA1*01:03-B1*02:01L
KSWMESEFRVYSS

SEQ ID NO: 25307 - protein, 12 aa, Severe acute respiratory syndrome coronavirus 2
  REGION 1..12: note = Table B: HLA-DPA1*01:03-B1*02:01L
PIGINITRFQTL

SEQ ID NO: 25308 - protein, 13 aa, Severe acute respiratory syndrome coronavirus 2
  REGION 1..13: note = Table B: HLA-DPA1*01:03-B1*02:01L
SFTVEKGIYQTSN

SEQ ID NO: 25309 - protein, 13 aa, Severe acute respiratory syndrome coronavirus 2
  REGION 1..13: note = Table B: HLA-DPA1*01:03-B1*02:01L
KGIYQTSNFRVQP

SEQ ID NO: 25310 - protein, 15 aa, Severe acute respiratory syndrome coronavirus 2
  REGION 1..15: note = Table B: HLA-DPA1*01:03-B1*02:01L
NATRFASVYAWNRKR

SEQ ID NO: 25311 - protein, 17 aa, Severe acute respiratory syndrome coronavirus 2
  REGION 1..17: note = Table B: HLA-DPA1*01:03-B1*02:01L
AENSVAYSNNSIAIPTN

SEQ ID NO: 25312 - protein, 16 aa, Severe acute respiratory syndrome coronavirus 2
  REGION 1..16: note = Table B: HLA-DPA1*01:03-B1*02:01L HLA-DRB1*08:02L
DAGFIKQYGDCLGDIA

SEQ ID NO: 25313 - protein, 13 aa, Severe acute respiratory syndrome coronavirus 2
  REGION 1..13: note = Table B: HLA-DPA1*01:03-B1*02:01L
IDRLITGRLQSLQ

SEQ ID NO: 25314 - protein, 14 aa, Severe acute respiratory syndrome coronavirus 2
  REGION 1..14: note = Table B: HLA-DPA1*01:03-B1*02:01L
PLLYDANYFLCWHT

SEQ ID NO: 25315 - protein, 13 aa, Severe acute respiratory syndrome coronavirus 2
  REGION 1..13: note = Table B: HLA-DPA1*01:03-B1*02:01L HLA-DRB1*08:03L
FYVYSRVKNLNSS

SEQ ID NO: 25316 - protein, 14 aa, Severe acute respiratory syndrome coronavirus 2
  REGION 1..14: note = Table B: HLA-DPA1*01:03-B1*02:01L HLA-DRB1*15:03L
VGLMWLSYFIASFR

SEQ ID NO: 25317 - protein, 14 aa, Severe acute respiratory syndrome coronavirus 2
  REGION 1..14: note = Table B: HLA-DPA1*01:03-B1*02:01L
VQELYSPIFLIVAA

SEQ ID NO: 25318 - protein, 15 aa, Severe acute respiratory syndrome coronavirus 2
  REGION 1..15: note = Table B: HLA-DPA1*01:03-B1*02:01L
GIIWVATEGALNTPK

SEQ ID NO: 25319 - protein, 17 aa, Severe acute respiratory syndrome coronavirus 2
  REGION 1..17: note = Table B: HLA-DPA1*01:03-B1*104:01L
LPVLQVRDVLVRGFGDS

SEQ ID NO: 25320 - protein, 16 aa, Severe acute respiratory syndrome coronavirus 2
  REGION 1..16: note = Table B: HLA-DPA1*01:03-B1*104:01L
SVEEVLSEARQHLKDG

SEQ ID NO: 25321 - protein, 13 aa, Severe acute respiratory syndrome coronavirus 2
  REGION 1..13: note = Table B: HLA-DPA1*01:03-B1*104:01L
LEGIQYGRSGETL

SEQ ID NO: 25322 - protein, 16 aa, Severe acute respiratory syndrome coronavirus 2
  REGION 1..16: note = Table B: HLA-DPA1*01:03-B1*104:01L
IQYGRSGETLGVLVPH

SEQ ID NO: 25323 - protein, 15 aa, Severe acute respiratory syndrome coronavirus 2
  REGION 1..15: note = Table B: HLA-DPA1*01:03-B1*104:01L HLA-DRB1*07:01L
GGHSYGADLKSFDLG

SEQ ID NO: 25324 - protein, 11 aa, Severe acute respiratory syndrome coronavirus 2
  REGION 1..11: note = Table B: HLA-DPA1*01:03-B1*104:01L
YELQTPFEIKL

SEQ ID NO: 25325 - protein, 15 aa, Severe acute respiratory syndrome coronavirus 2
  REGION 1..15: note = Table B: HLA-DPA1*01:03-B1*104:01L
LDYKAFKQIVESCGN

SEQ ID NO: 25326 - protein, 14 aa, Severe acute respiratory syndrome coronavirus 2
  REGION 1..14: note = Table B: HLA-DPA1*01:03-B1*104:01L HLA-DRB1*07:01L
NSVRVLQKAAITIL

SEQ ID NO: 25327 - protein, 14 aa, Severe acute respiratory syndrome coronavirus 2
  REGION 1..14: note = Table B: HLA-DPA1*01:03-B1*104:01L
LVNKFLALCADSII

SEQ ID NO: 25328 - protein, 15 aa, Severe acute respiratory syndrome coronavirus 2
  REGION 1..15: note = Table B: HLA-DPA1*01:03-B1*104:01L HLA-DQA1*05:05-B1*03:01L HLA-DRB1*04:08L
GAKLKALNLGETFVT

SEQ ID NO: 25329 - protein, 13 aa, Severe acute respiratory syndrome coronavirus 2
  REGION 1..13: note = Table B: HLA-DPA1*01:03-B1*104:01L
TGLLMPLKAPKEI

SEQ ID NO: 25330 - protein, 17 aa, Severe acute respiratory syndrome coronavirus 2
  REGION 1..17: note = Table B: HLA-DPA1*01:03-B1*104:01L
ERIDKVLNEKCSAYTVE

SEQ ID NO: 25331 - protein, 13 aa, Severe acute respiratory syndrome coronavirus 2
  REGION 1..13: note = Table B: HLA-DPA1*01:03-B1*104:01L
AVIKTLQPVSELL

SEQ ID NO: 25332 - protein, 16 aa, Severe acute respiratory syndrome coronavirus 2
  REGION 1..16: note = Table B: HLA-DPA1*01:03-B1*104:01L
LQPVSELLTPLGIDLD

SEQ ID NO: 25333 - protein, 13 aa, Severe acute respiratory syndrome coronavirus 2
  REGION 1..13: note = Table B: HLA-DPA1*01:03-B1*104:01L
ALNKATNNAMQVE

SEQ ID NO: 25334 - protein, 14 aa, Severe acute respiratory syndrome coronavirus 2
  REGION 1..14: note = Table B: HLA-DPA1*01:03-B1*104:01L
VESDDYIATNGPLK

SEQ ID NO: 25335 - protein, 13 aa, Severe acute respiratory syndrome coronavirus 2
  REGION 1..13: note = Table B: HLA-DPA1*01:03-B1*104:01L HLA-DRB1*07:01L
YTSKTTVASLINT

SEQ ID NO: 25336 - protein, 16 aa, Severe acute respiratory syndrome coronavirus 2
  REGION 1..16: note = Table B: HLA-DPA1*01:03-B1*104:01L
MPLGYVTHGLNLEEAA

SEQ ID NO: 25337 - protein, 16 aa, Severe acute respiratory syndrome coronavirus 2
  REGION 1..16: note = Table B: HLA-DPA1*01:03-B1*104:01L HLA-DPA1*01:02-B1*04:01L
AVTAYNGYLTSSSKTP

SEQ ID NO: 25338 - protein, 16 aa, Severe acute respiratory syndrome coronavirus 2
  REGION 1..16: note = Table B: HLA-DPA1*01:03-B1*104:01L
VITFDNLKTLLSLREV

SEQ ID NO: 25339 - protein, 13 aa, Severe acute respiratory syndrome coronavirus 2
  REGION 1..13: note = Table B: HLA-DPA1*01:03-B1*104:01L
RARAGEAANFCAL

SEQ ID NO: 25340 - protein, 18 aa, Severe acute respiratory syndrome coronavirus 2
  REGION 1..18: note = Table B: HLA-DPA1*01:03-B1*104:01L
ELKHGTFTCASEYTGNYQ

SEQ ID NO: 25341 - protein, 16 aa, Severe acute respiratory syndrome coronavirus 2
  REGION 1..16: note = Table B: HLA-DPA1*01:03-B1*104:01L
HYKHITSKETLYCIDG

SEQ ID NO: 25342 - protein, 17 aa, Severe acute respiratory syndrome coronavirus 2
  REGION 1..17: note = Table B: HLA-DPA1*01:03-B1*104:01L
YKHITSKETLYCIDGAL

SEQ ID NO: 25343 - protein, 13 aa, Severe acute respiratory syndrome coronavirus 2
  REGION 1..13: note = Table B: HLA-DPA1*01:03-B1*104:01L
LVPNQPYPNASFD

SEQ ID NO: 25344 - protein, 11 aa, Severe acute respiratory syndrome coronavirus 2
  REGION 1..11: note = Table B: HLA-DPA1*01:03-B1*104:01L
GDVVAIDYKHY

SEQ ID NO: 25345 - protein, 16 aa, Severe acute respiratory syndrome coronavirus 2
  REGION 1..16: note = Table B: HLA-DPA1*01:03-B1*104:01L
DTIANYAKPFLNKVVS

SEQ ID NO: 25346 - protein, 11 aa, Severe acute respiratory syndrome coronavirus 2
  REGION 1..11: note = Table B: HLA-DPA1*01:03-B1*104:01L
MAPISAMVRMY

SEQ ID NO: 25347 - protein, 16 aa, Severe acute respiratory syndrome coronavirus 2
  REGION 1..16: note = Table B: HLA-DPA1*01:03-B1*104:01L
VNGVRRSFYVYANGGK

SEQ ID NO: 25348 - protein, 15 aa, Severe acute respiratory syndrome coronavirus 2
  REGION 1..15: note = Table B: HLA-DPA1*01:03-B1*104:01L
GVRRSFYVYANGGKG

SEQ ID NO: 25349 - protein, 16 aa, Severe acute respiratory syndrome coronavirus 2
  REGION 1..16: note = Table B: HLA-DPA1*01:03-B1*104:01L
DQSSYIVDSVTVKNGS

SEQ ID NO: 25350 - protein, 15 aa, Severe acute respiratory syndrome coronavirus 2
  REGION 1..15: note = Table B: HLA-DPA1*01:03-B1*104:01L
NNTKGSLPINVIVFD

SEQ ID NO: 25351 - protein, 18 aa, Severe acute respiratory syndrome coronavirus 2
  REGION 1..18: note = Table B: HLA-DPA1*01:03-B1*104:01L
NTKGSLPINVIVFDGKSK

SEQ ID NO: 25352 - protein, 11 aa, Severe acute respiratory syndrome coronavirus 2
  REGION 1..11: note = Table B: HLA-DPA1*01:03-B1*104:01L HLA-DRB1*15:03L
ATAEAELAKNV

SEQ ID NO: 25353 - protein, 16 aa, Severe acute respiratory syndrome coronavirus 2
  REGION 1..16: note = Table B: HLA-DPA1*01:03-B1*104:01L
YMLTYNKVENMTPRDL

SEQ ID NO: 25354 - protein, 15 aa, Severe acute respiratory syndrome coronavirus 2
  REGION 1..15: note = Table B: HLA-DPA1*01:03-B1*104:01L
QVAKSHNIALIWNVK

SEQ ID NO: 25355 - protein, 14 aa, Severe acute respiratory syndrome coronavirus 2
  REGION 1..14: note = Table B: HLA-DPA1*01:03-B1*104:01L HLA-DQA1*01:03-B1*06:01L
TSYREAACCHLAKA

SEQ ID NO: 25356 - protein, 15 aa, Severe acute respiratory syndrome coronavirus 2
  REGION 1..15: note = Table B: HLA-DPA1*01:03-B1*104:01L
HLAKALNDFSNSGSD

SEQ ID NO: 25357 - protein, 16 aa, Severe acute respiratory syndrome coronavirus 2
  REGION 1..16: note = Table B: HLA-DPA1*01:03-B1*104:01L
LNPNYEDLLIRKSNHN

SEQ ID NO: 25358 - protein, 14 aa, Severe acute respiratory syndrome coronavirus 2
  REGION 1..14: note = Table B: HLA-DPA1*01:03-B1*104:01L HLA-DRB1*04:08L
VVTTVMFLARGIVF

SEQ ID NO: 25359 - protein, 18 aa, Severe acute respiratory syndrome coronavirus 2
  REGION 1..18: note = Table B: HLA-DPA1*01:03-B1*104:01L
GKPCIKVATVQSKMSDVK

SEQ ID NO: 25360 - protein, 15 aa, Severe acute respiratory syndrome coronavirus 2
  REGION 1..15: note = Table B: HLA-DPA1*01:03-B1*104:01L HLA-DRB1*07:01L
LSVLLSMQGAVDINK

SEQ ID NO: 25361 - protein, 11 aa, Severe acute respiratory syndrome coronavirus 2
  REGION 1..11: note = Table B: HLA-DPA1*01:03-B1*104:01L
MLDNRATLQAI

SEQ ID NO: 25362 - protein, 18 aa, Severe acute respiratory syndrome coronavirus 2
  REGION 1..18: note = Table B: HLA-DPA1*01:03-B1*104:01L
SAMQTMLFTMLRKLDNDA

SEQ ID NO: 25363 - protein, 15 aa, Severe acute respiratory syndrome coronavirus 2
  REGION 1..15: note = Table B: HLA-DPA1*01:03-B1*104:01L HLA-DRB1*15:01L
IVTALRANSAVKLQN

SEQ ID NO: 25364 - protein, 11 aa, Severe acute respiratory syndrome coronavirus 2
  REGION 1..11: note = Table B: HLA-DPA1*01:03-B1*104:01L
TACTDDNALAY

SEQ ID NO: 25365 - protein, 14 aa, Severe acute respiratory syndrome coronavirus 2
  REGION 1..14: note = Table B: HLA-DPA1*01:03-B1*104:01L HLA-DRB1*08:02L
YLYFIKGLNNLNRG

SEQ ID NO: 25366 - protein, 14 aa, Severe acute respiratory syndrome coronavirus 2
  REGION 1..14: note = Table B: HLA-DPA1*01:03-B1*104:01L HLA-DRB1*07:01L
LKGKYVQIPTTCAN

SEQ ID NO: 25367 - protein, 15 aa, Severe acute respiratory syndrome coronavirus 2
  REGION 1..15: note = Table B: HLA-DPA1*01:03-B1*104:01L HLA-DRB1*07:01L HLA-DRB1*08:02L
KGKYVQIPTTCANDP

SEQ ID NO: 25368 - protein, 15 aa, Severe acute respiratory syndrome coronavirus 2
  REGION 1..15: note = Table B: HLA-DPA1*01:03-B1*104:01L
GKYVQIPTTCANDPV

SEQ ID NO: 25369 - protein, 15 aa, Severe acute respiratory syndrome coronavirus 2
  REGION 1..15: note = Table B: HLA-DPA1*01:03-B1*104:01L HLA-DRB1*07:01L
VVYRAFDIYNDKVAG

SEQ ID NO: 25370 - protein, 15 aa, Severe acute respiratory syndrome coronavirus 2
  REGION 1..15: note = Table B: HLA-DPA1*01:03-B1*104:01L
NLLKDCPAVAKHDFF

SEQ ID NO: 25371 - protein, 15 aa, Severe acute respiratory syndrome coronavirus 2
  REGION 1..15: note = Table B: HLA-DPA1*01:03-B1*104:01L
FNKKDWYDFVENPDI

SEQ ID NO: 25372 - protein, 15 aa, Severe acute respiratory syndrome coronavirus 2
  REGION 1..15: note = Table B: HLA-DPA1*01:03-B1*104:01L
ILTLTRALTAESHVD

SEQ ID NO: 25373 - protein, 16 aa, Severe acute respiratory syndrome coronavirus 2
  REGION 1..16: note = Table B: HLA-DPA1*01:03-B1*104:01L
TKPYIKWDLLKYDFTE

SEQ ID NO: 25374 - protein, 16 aa, Severe acute respiratory syndrome coronavirus 2
  REGION 1..16: note = Table B: HLA-DPA1*01:03-B1*104:01L
ELGVVHNQDVNLHSSR

SEQ ID NO: 25375 - protein, 17 aa, Severe acute respiratory syndrome coronavirus 2
  REGION 1..17: note = Table B: HLA-DPA1*01:03-B1*104:01L HLA-DRB1*15:03L
DKRTTCFSVAALTNNVA

SEQ ID NO: 25376 - protein, 16 aa, Severe acute respiratory syndrome coronavirus 2
  REGION 1..16: note = Table B: HLA-DPA1*01:03-B1*104:01L
VKPGNFNKDFYDFAVS

SEQ ID NO: 25377 - protein, 16 aa, Severe acute respiratory syndrome coronavirus 2
  REGION 1..16: note = Table B: HLA-DPA1*01:03-B1*104:01L
DFAVSKGFFKEGSSVE

SEQ ID NO: 25378 - protein, 14 aa, Severe acute respiratory syndrome coronavirus 2
  REGION 1..14: note = Table B: HLA-DPA1*01:03-B1*104:01L
LFAYTKRNVIPTIT

SEQ ID NO: 25379 - protein, 14 aa, Severe acute respiratory syndrome coronavirus 2
  REGION 1..14: note = Table B: HLA-DPA1*01:03-B1*104:01L
LSHRFYRLANECAQ

SEQ ID NO: 25380 - protein, 15 aa, Severe acute respiratory syndrome coronavirus 2
  REGION 1..15: note = Table B: HLA-DPA1*01:03-B1*104:01L HLA-DQA1*05:05-B1*03:01L
TAYANSVFNICQAVT

SEQ ID NO: 25381 - protein, 16 aa, Severe acute respiratory syndrome coronavirus 2
  REGION 1..16: note = Table B: HLA-DPA1*01:03-B1*104:01L
NLQHRLYECLYRNRDV

SEQ ID NO: 25382 - protein, 18 aa, Severe acute respiratory syndrome coronavirus 2
  REGION 1..18: note = Table B: HLA-DPA1*01:03-B1*104:01L
PDPSRILGAGCFVDDIVK

SEQ ID NO: 25383 - protein, 14 aa, Severe acute respiratory syndrome coronavirus 2
  REGION 1..14: note = Table B: HLA-DPA1*01:03-B1*104:01L
FKLSYGIATVREVL

SEQ ID NO: 25384 - protein, 15 aa, Severe acute respiratory syndrome coronavirus 2
  REGION 1..15: note = Table B: HLA-DPA1*01:03-B1*104:01L
EQYVFCTVNALPETT

SEQ ID NO: 25385 - protein, 15 aa, Severe acute respiratory syndrome coronavirus 2
  REGION 1..15: note = Table B: HLA-DPA1*01:03-B1*104:01L HLA-DQA1*05:05-B1*03:01L
SALVYDNKLKAHKDK

SEQ ID NO: 25386 - protein, 14 aa, Severe acute respiratory syndrome coronavirus 2
  REGION 1..14: note = Table B: HLA-DPA1*01:03-B1*104:01L
FKMFYKGVITHDVS

SEQ ID NO: 25387 - protein, 14 aa, Severe acute respiratory syndrome coronavirus 2
  REGION 1..14: note = Table B: HLA-DPA1*01:03-B1*104:01L
WRKAVFISPYNSQN

SEQ ID NO: 25388 - protein, 13 aa, Severe acute respiratory syndrome coronavirus 2
  REGION 1..13: note = Table B: HLA-DPA1*01:03-B1*104:01L
VATLQAENVTGLF

SEQ ID NO: 25389 - protein, 12 aa, Severe acute respiratory syndrome coronavirus 2
  REGION 1..12: note = Table B: HLA-DPA1*01:03-B1*104:01L HLA-DRB1*16:01L
VDIPGIPKDMTY

SEQ ID NO: 25390 - protein, 15 aa, Severe acute respiratory syndrome coronavirus 2
  REGION 1..15: note = Table B: HLA-DPA1*01:03-B1*104:01L
STGVNLVAVPTGYVD

SEQ ID NO: 25391 - protein, 17 aa, Severe acute respiratory syndrome coronavirus 2
  REGION 1..17: note = Table B: HLA-DPA1*01:03-B1*104:01L
DQFKHLIPLMYKGLPWN

SEQ ID NO: 25392 - protein, 14 aa, Severe acute respiratory syndrome coronavirus 2
  REGION 1..14: note = Table B: HLA-DPA1*01:03-B1*104:01L
TSMKYFVKIGPERT

SEQ ID NO: 25393 - protein, 15 aa, Severe acute respiratory syndrome coronavirus 2
  REGION 1..15: note = Table B: HLA-DPA1*01:03-B1*104:01L
KVQHMVVKAALLADK

SEQ ID NO: 25394 - protein, 17 aa, Severe acute respiratory syndrome coronavirus 2
  REGION 1..17: note = Table B: HLA-DPA1*01:03-B1*104:01L
EELFYSYATHSDKFTDG

SEQ ID NO: 25395 - protein, 14 aa, Severe acute respiratory syndrome coronavirus 2
  REGION 1..14: note = Table B: HLA-DPA1*01:03-B1*104:01L
NVAFNVVNKGHFDG

SEQ ID NO: 25396 - protein, 14 aa, Severe acute respiratory syndrome coronavirus 2
  REGION 1..14: note = Table B: HLA-DPA1*01:03-B1*104:01L
IINNTVYTKVDGVD

SEQ ID NO: 25397 - protein, 15 aa, Severe acute respiratory syndrome coronavirus 2
  REGION 1..15: note = Table B: HLA-DPA1*01:03-B1*104:01L HLA-DQA1*01:03-B1*06:01L
DIAKKPTETICAPLT

SEQ ID NO: 25398 - protein, 11 aa, Severe acute respiratory syndrome coronavirus 2
  REGION 1..11: note = Table B: HLA-DPA1*01:03-B1*104:01L
TLIGEAVKTQF

SEQ ID NO: 25399 - protein, 15 aa, Severe acute respiratory syndrome coronavirus 2
  REGION 1..15: note = Table B: HLA-DPA1*01:03-B1*104:01L
TQFNYYKKVDGVVQQ

SEQ ID NO: 25400 - protein, 15 aa, Severe acute respiratory syndrome coronavirus 2
  REGION 1..15: note = Table B: HLA-DPA1*01:03-B1*104:01L
YYKKVDGVVQQLPET

SEQ ID NO: 25401 - protein, 19 aa, Severe acute respiratory syndrome coronavirus 2
  REGION 1..19: note = Table B: HLA-DPA1*01:03-B1*104:01L
PETYFTQSRNLQEFKPRSQ

SEQ ID NO: 25402 - protein, 16 aa, Severe acute respiratory syndrome coronavirus 2
  REGION 1..16: note = Table B: HLA-DPA1*01:03-B1*104:01L
IGLAKRFKESPFELED

SEQ ID NO: 25403 - protein, 15 aa, Severe acute respiratory syndrome coronavirus 2
  REGION 1..15: note = Table B: HLA-DPA1*01:03-B1*104:01L
DLLLDDFVEIIKSQD

SEQ ID NO: 25404 - protein, 11 aa, Severe acute respiratory syndrome coronavirus 2
  REGION 1..11: note = Table B: HLA-DPA1*01:03-B1*104:01L
VEIIKSQDLSV

SEQ ID NO: 25405 - protein, 16 aa, Severe acute respiratory syndrome coronavirus 2
  REGION 1..16: note = Table B: HLA-DPA1*01:03-B1*104:01L
GSVAIKITEHSWNADL

SEQ ID NO: 25406 - protein, 13 aa, Severe acute respiratory syndrome coronavirus 2
  REGION 1..13: note = Table B: HLA-DPA1*01:03-B1*104:01L HLA-DPA1*01:02-B1*04:01L HLA-DRB1*08:02L
AFVTNVNASSSEA

SEQ ID NO: 25407 - protein, 12 aa, Severe acute respiratory syndrome coronavirus 2
  REGION 1..12: note = Table B: HLA-DPA1*01:03-B1*104:01L
YIFWRNTNPIQL

SEQ ID NO: 25408 - protein, 15 aa, Severe acute respiratory syndrome coronavirus 2
  REGION 1..15: note = Table B: HLA-DPA1*01:03-B1*104:01L
IIRENNRVVISSDVL

SEQ ID NO: 25409 - protein, 14 aa, Severe acute respiratory syndrome coronavirus 2
  REGION 1..14: note = Table B: HLA-DPA1*01:03-B1*104:01L
RGVYYPDKVFRSSV

SEQ ID NO: 25410 - protein, 16 aa, Severe acute respiratory syndrome coronavirus 2
  REGION 1..16: note = Table B: HLA-DPA1*01:03-B1*104:01L
PDKVFRSSVLHSTQDL

SEQ ID NO: 25411 - protein, 11 aa, Severe acute respiratory syndrome coronavirus 2
  REGION 1..11: note = Table B: HLA-DPA1*01:03-B1*104:01L
TLDSKTQSLLI

SEQ ID NO: 25412 - protein, 13 aa, Severe acute respiratory syndrome coronavirus 2
  REGION 1..13: note = Table B: HLA-DPA1*01:03-B1*104:01L
NDPFLGVYYHKNN

SEQ ID NO: 25413 - protein, 16 aa, Severe acute respiratory syndrome coronavirus 2
  REGION 1..16: note = Table B: HLA-DPA1*01:03-B1*104:01L
EPLVDLPIGINITRFQ

SEQ ID NO: 25414 - protein, 16 aa, Severe acute respiratory syndrome coronavirus 2
  REGION 1..16: note = Table B: HLA-DPA1*01:03-B1*104:01L HLA-DRB1*08:02L HLA-DRB1*08:03L
QTLLALHRSYLTPGDS

SEQ ID NO: 25415 - protein, 11 aa, Severe acute respiratory syndrome coronavirus 2
  REGION 1..11: note = Table B: HLA-DPA1*01:03-B1*104:01L
SGWTAGAAAYY

SEQ ID NO: 25416 - protein, 15 aa, Severe acute respiratory syndrome coronavirus 2
  REGION 1..15: note = Table B: HLA-DPA1*01:03-B1*104:01L HLA-DQA1*05:05-B1*03:01L
SIVRFPNITNLCPFG

SEQ ID NO: 25417 - protein, 14 aa, Severe acute respiratory syndrome coronavirus 2
  REGION 1..14: note = Table B: HLA-DPA1*01:03-B1*104:01L HLA-DRB1*07:01L
WNRKRISNCVADYS

SEQ ID NO: 25418 - protein, 16 aa, Severe acute respiratory syndrome coronavirus 2
  REGION 1..16: note = Table B: HLA-DPA1*01:03-B1*104:01L
QPYRVVVLSFELLHAP

SEQ ID NO: 25419 - protein, 18 aa, Severe acute respiratory syndrome coronavirus 2
  REGION 1..18: note = Table B: HLA-DPA1*01:03-B1*104:01L
TGTGVLTESNKKFLPFQQ

SEQ ID NO: 25420 - protein, 16 aa, Severe acute respiratory syndrome coronavirus 2
  REGION 1..16: note = Table B: HLA-DPA1*01:03-B1*104:01L HLA-DQA1*01:03-B1*06:01L
VAVLYQDVNCTEVPVA

SEQ ID NO: 25421 - protein, 15 aa, Severe acute respiratory syndrome coronavirus 2
  REGION 1..15: note = Table B: HLA-DPA1*01:03-B1*104:01L
DQLTPTWRVYSTGSN

SEQ ID NO: 25422 - protein, 13 aa, Severe acute respiratory syndrome coronavirus 2
  REGION 1..13: note = Table B: HLA-DPA1*01:03-B1*104:01L
YTMSLGAENSVAY

SEQ ID NO: 25423 - protein, 15 aa, Severe acute respiratory syndrome coronavirus 2
  REGION 1..15: note = Table B: HLA-DPA1*01:03-B1*104:01L
GKLQDVVNQNAQALN

SEQ ID NO: 25424 - protein, 15 aa, Severe acute respiratory syndrome coronavirus 2
  REGION 1..15: note = Table B: HLA-DPA1*01:03-B1*104:01L
HFPREGVFVSNGTHW

SEQ ID NO: 25425 - protein, 15 aa, Severe acute respiratory syndrome coronavirus 2
  REGION 1..15: note = Table B: HLA-DPA1*01:03-B1*104:01L
TQRNFYEPQIITTDN

SEQ ID NO: 25426 - protein, 14 aa, Severe acute respiratory syndrome coronavirus 2
  REGION 1..14: note = Table B: HLA-DPA1*01:03-B1*104:01L
RNFYEPQIITTDNT

SEQ ID NO: 25427 - protein, 15 aa, Severe acute respiratory syndrome coronavirus 2
  REGION 1..15: note = Table B: HLA-DPA1*01:03-B1*104:01L
KYFKNHTSPDVDLGD

SEQ ID NO: 25428 - protein, 13 aa, Severe acute respiratory syndrome coronavirus 2
  REGION 1..13: note = Table B: HLA-DPA1*01:03-B1*104:01L
LLAVFQSASKIIT

SEQ ID NO: 25429 - protein, 14 aa, Severe acute respiratory syndrome coronavirus 2
  REGION 1..14: note = Table B: HLA-DPA1*01:03-B1*104:01L
LKKRWQLALSKGVH

SEQ ID NO: 25430 - protein, 14 aa, Severe acute respiratory syndrome coronavirus 2
  REGION 1..14: note = Table B: HLA-DPA1*01:03-B1*104:01L
RINWITGGIAIAMA

SEQ ID NO: 25431 - protein, 11 aa, Severe acute respiratory syndrome coronavirus 2
  REGION 1..11: note = Table B: HLA-DPA1*01:03-B1*104:01L
GDSGFAAYSRY

SEQ ID NO: 25432 - protein, 17 aa, Severe acute respiratory syndrome coronavirus 2
  REGION 1..17: note = Table B: HLA-DPA1*01:03-B1*104:01L
SKWYIRVGARKSAPLIE

SEQ ID NO: 25433 - protein, 18 aa, Severe acute respiratory syndrome coronavirus 2
  REGION 1..18: note = Table B: HLA-DPA1*01:03-B1*104:01L
APLIELCVDEAGSKSPIQ

SEQ ID NO: 25434 - protein, 13 aa, Severe acute respiratory syndrome coronavirus 2
  REGION 1..13: note = Table B: HLA-DPA1*01:03-B1*104:01L
EPKLGSLVVRCSF

SEQ ID NO: 25435 - protein, 16 aa, Severe acute respiratory syndrome coronavirus 2
  REGION 1..16: note = Table B: HLA-DPA1*01:03-B1*104:01L
GPSDSTGSNQNGERSG

SEQ ID NO: 25436 - protein, 15 aa, Severe acute respiratory syndrome coronavirus 2
  REGION 1..15: note = Table B: HLA-DPA1*01:03-B1*104:01L
FYYLGTGPEAGLPYG

SEQ ID NO: 25437 - protein, 13 aa, Severe acute respiratory syndrome coronavirus 2
  REGION 1..13: note = Table B: HLA-DPA1*01:03-B1*104:01L
WLTYTGAIKLDDK

SEQ ID NO: 25438 - protein, 16 aa, Severe acute respiratory syndrome coronavirus 2
  REGION 1..16: note = Table B: HLA-DPA1*01:03-B1*104:01L HLA-DRB1*07:01L
FSKQLQQSMSSADSTQ

SEQ ID NO: 25439 - protein, 13 aa, Severe acute respiratory syndrome coronavirus 2
  REGION 1..13: note = Table B: HLA-DQA1*05:05-B1*03:01L
LKDGTCGLVEVEK

SEQ ID NO: 25440 - protein, 12 aa, Severe acute respiratory syndrome coronavirus 2
  REGION 1..12: note = Table B: HLA-DQA1*05:05-B1*03:01L
VEVEKGVLPQLE

SEQ ID NO: 25441 - protein, 13 aa, Severe acute respiratory syndrome coronavirus 2
  REGION 1..13: note = Table B: HLA-DQA1*05:05-B1*03:01L
EVEKGVLPQLEQP

SEQ ID NO: 25442 - protein, 14 aa, Severe acute respiratory syndrome coronavirus 2
  REGION 1..14: note = Table B: HLA-DQA1*05:05-B1*03:01L
AGGHSYGADLKSFD

SEQ ID NO: 25443 - protein, 16 aa, Severe acute respiratory syndrome coronavirus 2
  REGION 1..16: note = Table B: HLA-DQA1*05:05-B1*03:01L
TENLTKEGATTCGYLP

SEQ ID NO: 25444 - protein, 14 aa, Severe acute respiratory syndrome coronavirus 2
  REGION 1..14: note = Table B: HLA-DQA1*05:05-B1*03:01L HLA-DQA1*01:03-B1*06:01L
LTKEGATTCGYLPQ

SEQ ID NO: 25445 - protein, 14 aa, Severe acute respiratory syndrome coronavirus 2
  REGION 1..14: note = Table B: HLA-DQA1*05:05-B1*03:01L
LNEEIAIILASFSA

SEQ ID NO: 25446 - protein, 12 aa, Severe acute respiratory syndrome coronavirus 2
  REGION 1..12: note = Table B: HLA-DQA1*05:05-B1*03:01L
ASEAARVVRSIF

SEQ ID NO: 25447 - protein, 12 aa, Severe acute respiratory syndrome coronavirus 2
  REGION 1..12: note = Table B: HLA-DQA1*05:05-B1*03:01L
SEAARVVRSIFS

SEQ ID NO: 25448 - protein, 11 aa, Severe acute respiratory syndrome coronavirus 2
  REGION 1..11: note = Table B: HLA-DQA1*05:05-B1*03:01L
AYITGGVVQLT

SEQ ID NO: 25449 - protein, 12 aa, Severe acute respiratory syndrome coronavirus 2
  REGION 1..12: note = Table B: HLA-DQA1*05:05-B1*03:01L
EAPLVGTPVCIN

SEQ ID NO: 25450 - protein, 13 aa, Severe acute respiratory syndrome coronavirus 2
  REGION 1..13: note = Table B: HLA-DQA1*05:05-B1*03:01L
ALAPNMMVTNNTF

SEQ ID NO: 25451 - protein, 16 aa, Severe acute respiratory syndrome coronavirus 2
  REGION 1..16: note = Table B: HLA-DQA1*05:05-B1*03:01L
DKVLNEKCSAYTVELG

SEQ ID NO: 25452 - protein, 12 aa, Severe acute respiratory syndrome coronavirus 2
  REGION 1..12: note = Table B: HLA-DQA1*05:05-B1*03:01L
YTVELGTEVNEF

SEQ ID NO: 25453 - protein, 17 aa, Severe acute respiratory syndrome coronavirus 2
  REGION 1..17: note = Table B: HLA-DQA1*05:05-B1*03:01L
DLDEWSMATYYLFDESG

SEQ ID NO: 25454 - protein, 14 aa, Severe acute respiratory syndrome coronavirus 2
  REGION 1..14: note = Table B: HLA-DQA1*05:05-B1*03:01L
EFEPSTQYEYGTED

SEQ ID NO: 25455 - protein, 11 aa, Severe acute respiratory syndrome coronavirus 2
  REGION 1..11: note = Table B: HLA-DQA1*05:05-B1*03:01L
DDYQGKPLEFG

SEQ ID NO: 25456 - protein, 16 aa, Severe acute respiratory syndrome coronavirus 2
  REGION 1..16: note = Table B: HLA-DQA1*05:05-B1*03:01L HLA-DQA1*01:03-B1*06:01L HLA-DQA1*02:01-B1*03:03L
VGQQDGSEDNQTTTIQ

SEQ ID NO: 25457 - protein, 12 aa, Severe acute respiratory syndrome coronavirus 2
  REGION 1..12: note = Table B: HLA-DQA1*05:05-B1*03:01L
TNNAMQVESDDY

SEQ ID NO: 25458 - protein, 13 aa, Severe acute respiratory syndrome coronavirus 2
  REGION 1..13: note = Table B: HLA-DQA1*05:05-B1*03:01L
FNQHEVLLAPLLS

SEQ ID NO: 25459 - protein, 14 aa, Severe acute respiratory syndrome coronavirus 2
  REGION 1..14: note = Table B: HLA-DQA1*05:05-B1*03:01L HLA-DQA1*01:03-B1*06:01L
VVQEGVLTAVVIPT

SEQ ID NO: 25460 - protein, 11 aa, Severe acute respiratory syndrome coronavirus 2
  REGION 1..11: note = Table B: HLA-DQA1*05:05-B1*03:01L
GTTEMLAKALR

SEQ ID NO: 25461 - protein, 12 aa, Severe acute respiratory syndrome coronavirus 2
  REGION 1..12: note = Table B: HLA-DQA1*05:05-B1*03:01L
YPGQGLNGYTVE

SEQ ID NO: 25462 - protein, 13 aa, Severe acute respiratory syndrome coronavirus 2
  REGION 1..13: note = Table B: HLA-DQA1*05:05-B1*03:01L
TSKTTVASLINTL

SEQ ID NO: 25463 - protein, 15 aa, Severe acute respiratory syndrome coronavirus 2
  REGION 1..15: note = Table B: HLA-DQA1*05:05-B1*03:01L
DVTKIKPHNSHEGKT

SEQ ID NO: 25464 - protein, 17 aa, Severe acute respiratory syndrome coronavirus 2
  REGION 1..17: note = Table B: HLA-DQA1*05:05-B1*03:01L
IKPHNSHEGKTFYVLPN

SEQ ID NO: 25465 - protein, 15 aa, Severe acute respiratory syndrome coronavirus 2
  REGION 1..15: note = Table B: HLA-DQA1*05:05-B1*03:01L
TSIKWADNNCYLATA

SEQ ID NO: 25466 - protein, 13 aa, Severe acute respiratory syndrome coronavirus 2
  REGION 1..13: note = Table B: HLA-DQA1*05:05-B1*03:01L
AVMYMGTLSYEQF

SEQ ID NO: 25467 - protein, 15 aa, Severe acute respiratory syndrome coronavirus 2
  REGION 1..15: note = Table B: HLA-DQA1*05:05-B1*03:01L
LVQQESPFVMMSAPP

SEQ ID NO: 25468 - protein, 12 aa, Severe acute respiratory syndrome coronavirus 2
  REGION 1..12: note = Table B: HLA-DQA1*05:05-B1*03:01L
SSEYKGPITDVF

SEQ ID NO: 25469 - protein, 12 aa, Severe acute respiratory syndrome coronavirus 2
  REGION 1..12: note = Table B: HLA-DQA1*05:05-B1*03:01L
VPNQPYPNASFD

SEQ ID NO: 25470 - protein, 17 aa, Severe acute respiratory syndrome coronavirus 2
  REGION 1..17: note = Table B: HLA-DQA1*05:05-B1*03:01L
NPTIQKDVLECNVKTTE

SEQ ID NO: 25471 - protein, 16 aa, Severe acute respiratory syndrome coronavirus 2
  REGION 1..16: note = Table B: HLA-DQA1*05:05-B1*03:01L
IQKDVLECNVKTTEVV

SEQ ID NO: 25472 - protein, 13 aa, Severe acute respiratory syndrome coronavirus 2
  REGION 1..13: note = Table B: HLA-DQA1*05:05-B1*03:01L
PANNSLKITEEVG

SEQ ID NO: 25473 - protein, 14 aa, Severe acute respiratory syndrome coronavirus 2
  REGION 1..14: note = Table B: HLA-DQA1*05:05-B1*03:01L
SLKITEEVGHTDLM

SEQ ID NO: 25474 - protein, 14 aa, Severe acute respiratory syndrome coronavirus 2
  REGION 1..14: note = Table B: HLA-DQA1*05:05-B1*03:01L
ITEEVGHTDLMAAY

SEQ ID NO: 25475 - protein, 12 aa, Severe acute respiratory syndrome coronavirus 2
  REGION 1..12: note = Table B: HLA-DQA1*05:05-B1*03:01L
KTLATHGLAAVN

SEQ ID NO: 25476 - protein, 12 aa, Severe acute respiratory syndrome coronavirus 2
  REGION 1..12: note = Table B: HLA-DQA1*05:05-B1*03:01L HLA-DRB1*14:17L
GLAAVNSVPWDT

SEQ ID NO: 25477 - protein, 13 aa, Severe acute respiratory syndrome coronavirus 2
  REGION 1..13: note = Table B: HLA-DQA1*05:05-B1*03:01L
SNLGMPSYCTGYR

SEQ ID NO: 25478 - protein, 14 aa, Severe acute respiratory syndrome coronavirus 2
  REGION 1..14: note = Table B: HLA-DQA1*05:05-B1*03:01L
TGSIPCSVCLSGLD

SEQ ID NO: 25479 - protein, 14 aa, Severe acute respiratory syndrome coronavirus 2
  REGION 1..14: note = Table B: HLA-DQA1*05:05-B1*03:01L
GSIPCSVCLSGLDS

SEQ ID NO: 25480 - protein, 14 aa, Severe acute respiratory syndrome coronavirus 2
  REGION 1..14: note = Table B: HLA-DQA1*05:05-B1*03:01L
SLDTYPSLETIQIT

SEQ ID NO: 25481 - protein, 14 aa, Severe acute respiratory syndrome coronavirus 2
  REGION 1..14: note = Table B: HLA-DQA1*05:05-B1*03:01L
DTYPSLETIQITIS

SEQ ID NO: 25482 - protein, 15 aa, Severe acute respiratory syndrome coronavirus 2
  REGION 1..15: note = Table B: HLA-DQA1*05:05-B1*03:01L
SSFKWDLTAFGLVAE

SEQ ID NO: 25483 - protein, 13 aa, Severe acute respiratory syndrome coronavirus 2
  REGION 1..13: note = Table B: HLA-DQA1*05:05-B1*03:01L
VTVKNGSIHLYFD

SEQ ID NO: 25484 - protein, 12 aa, Severe acute respiratory syndrome coronavirus 2
  REGION 1..12: note = Table B: HLA-DQA1*05:05-B1*03:01L
NTKGSLPINVIV

SEQ ID NO: 25485 - protein, 14 aa, Severe acute respiratory syndrome coronavirus 2
  REGION 1..14: note = Table B: HLA-DQA1*05:05-B1*03:01L
TKGSLPINVIVFDG

SEQ ID NO: 25486 - protein, 11 aa, Severe acute respiratory syndrome coronavirus 2
  REGION 1..11: note = Table B: HLA-DQA1*05:05-B1*03:01L
AKSASVYYSQL

SEQ ID NO: 25487 - protein, 16 aa, Severe acute respiratory syndrome coronavirus 2
  REGION 1..16: note = Table B: HLA-DQA1*05:05-B1*03:01L
LAKNVSLDNVLSTFIS

SEQ ID NO: 25488 - protein, 12 aa, Severe acute respiratory syndrome coronavirus 2
  REGION 1..12: note = Table B: HLA-DQA1*05:05-B1*03:01L
ALKGGKIVNNWL

SEQ ID NO: 25489 - protein, 12 aa, Severe acute respiratory syndrome coronavirus 2
  REGION 1..12: note = Table B: HLA-DQA1*05:05-B1*03:01L
VGFVVPGLPGTI

SEQ ID NO: 25490 - protein, 13 aa, Severe acute respiratory syndrome coronavirus 2
  REGION 1..13: note = Table B: HLA-DQA1*05:05-B1*03:01L
VFSAVGNICYTPS

SEQ ID NO: 25491 - protein, 13 aa, Severe acute respiratory syndrome coronavirus 2
  REGION 1..13: note = Table B: HLA-DQA1*05:05-B1*03:01L HLA-DQA1*01:03-B1*06:01L HLA-DQA1*02:01-B1*03:03L
ASGKPVPYCYDTN

SEQ ID NO: 25492 - protein, 13 aa, Severe acute respiratory syndrome coronavirus 2
  REGION 1..13: note = Table B: HLA-DQA1*05:05-B1*03:01L
YDTNVLEGSVAYE

SEQ ID NO: 25493 - protein, 13 aa, Severe acute respiratory syndrome coronavirus 2
  REGION 1..13: note = Table B: HLA-DQA1*05:05-B1*03:01L
DTNVLEGSVAYES

SEQ ID NO: 25494 - protein, 12 aa, Severe acute respiratory syndrome coronavirus 2
  REGION 1..12: note = Table B: HLA-DQA1*05:05-B1*03:01L
TYLEGSVRVVTT

SEQ ID NO: 25495 - protein, 12 aa, Severe acute respiratory syndrome coronavirus 2
  REGION 1..12: note = Table B: HLA-DQA1*05:05-B1*03:01L
ASIVAGGIVAIV

SEQ ID NO: 25496 - protein, 12 aa, Severe acute respiratory syndrome coronavirus 2
  REGION 1..12: note = Table B: HLA-DQA1*05:05-B1*03:01L
SIVAGGIVAIVV

SEQ ID NO: 25497 - protein, 15 aa, Severe acute respiratory syndrome coronavirus 2
  REGION 1..15: note = Table B: HLA-DQA1*05:05-B1*03:01L
FTVLCLTPVYSFLPG

SEQ ID NO: 25498 - protein, 13 aa, Severe acute respiratory syndrome coronavirus 2
  REGION 1..13: note = Table B: HLA-DQA1*05:05-B1*03:01L HLA-DRB1*04:08L
ITIAYIICISTKH

SEQ ID NO: 25499 - protein, 13 aa, Severe acute respiratory syndrome coronavirus 2
  REGION 1..13: note = Table B: HLA-DQA1*05:05-B1*03:01L
LRSDVLLPLTQYN

SEQ ID NO: 25500 - protein, 16 aa, Severe acute respiratory syndrome coronavirus 2
  REGION 1..16: note = Table B: HLA-DQA1*05:05-B1*03:01L
LPLTQYNRYLALYNKY

SEQ ID NO: 25501 - protein, 12 aa, Severe acute respiratory syndrome coronavirus 2
  REGION 1..12: note = Table B: HLA-DQA1*05:05-B1*03:01L
DVLYQPPQTSIT

SEQ ID NO: 25502 - protein, 12 aa, Severe acute respiratory syndrome coronavirus 2
  REGION 1..12: note = Table B: HLA-DQA1*05:05-B1*03:01L
VLYQPPQTSITS

SEQ ID NO: 25503 - protein, 13 aa, Severe acute respiratory syndrome coronavirus 2
  REGION 1..13: note = Table B: HLA-DQA1*05:05-B1*03:01L
GKVEGCMVQVTCG

SEQ ID NO: 25504 - protein, 12 aa, Severe acute respiratory syndrome coronavirus 2
  REGION 1..12: note = Table B: HLA-DQA1*05:05-B1*03:01L
VQAGNVQLRVIG

SEQ ID NO: 25505 - protein, 14 aa, Severe acute respiratory syndrome coronavirus 2
  REGION 1..14: note = Table B: HLA-DQA1*05:05-B1*03:01L
IQPGQTFSVLACYN

SEQ ID NO: 25506 - protein, 13 aa, Severe acute respiratory syndrome coronavirus 2
  REGION 1..13: note = Table B: HLA-DQA1*05:05-B1*03:01L
VLACYNGSPSGVY

SEQ ID NO: 25507 - protein, 15 aa, Severe acute respiratory syndrome coronavirus 2
  REGION 1..15: note = Table B: HLA-DQA1*05:05-B1*03:01L
AGTDLEGNFYGPFVD

SEQ ID NO: 25508 - protein, 13 aa, Severe acute respiratory syndrome coronavirus 2
  REGION 1..13: note = Table B: HLA-DQA1*05:05-B1*03:01L HLA-DQA1*02:01-B1*03:03L
LLQNGMNGRTILG

SEQ ID NO: 25509 - protein, 14 aa, Severe acute respiratory syndrome coronavirus 2
  REGION 1..14: note = Table B: HLA-DQA1*05:05-B1*03:01L HLA-DQA1*02:01-B1*03:03L
LQNGMNGRTILGSA

SEQ ID NO: 25510 - protein, 13 aa, Severe acute respiratory syndrome coronavirus 2
  REGION 1..13: note = Table B: HLA-DQA1*05:05-B1*03:01L HLA-DQA1*01:03-B1*06:01L
ILTSLLVLVQSTQ

SEQ ID NO: 25511 - protein, 13 aa, Severe acute respiratory syndrome coronavirus 2
  REGION 1..13: note = Table B: HLA-DQA1*05:05-B1*03:01L
FLYENAFLPFAMG

SEQ ID NO: 25512 - protein, 14 aa, Severe acute respiratory syndrome coronavirus 2
  REGION 1..14: note = Table B: HLA-DQA1*05:05-B1*03:01L
LPSLATVAYFNMVY

SEQ ID NO: 25513 - protein, 11 aa, Severe acute respiratory syndrome coronavirus 2
  REGION 1..11: note = Table B: HLA-DQA1*05:05-B1*03:01L
ILMTARTVYDD

SEQ ID NO: 25514 - protein, 12 aa, Severe acute respiratory syndrome coronavirus 2
  REGION 1..12: note = Table B: HLA-DQA1*05:05-B1*03:01L
FFITGNTLQCIM

SEQ ID NO: 25515 - protein, 13 aa, Severe acute respiratory syndrome coronavirus 2
  REGION 1..13: note = Table B: HLA-DQA1*05:05-B1*03:01L
VLQQLRVESSSKL

SEQ ID NO: 25516 - protein, 13 aa, Severe acute respiratory syndrome coronavirus 2
  REGION 1..13: note = Table B: HLA-DQA1*05:05-B1*03:01L
VESSSKLWAQCVQ

SEQ ID NO: 25517 - protein, 14 aa, Severe acute respiratory syndrome coronavirus 2
  REGION 1..14: note = Table B: HLA-DQA1*05:05-B1*03:01L HLA-DRB1*15:03L
TLQAIASEFSSLPS

SEQ ID NO: 25518 - protein, 14 aa, Severe acute respiratory syndrome coronavirus 2
  REGION 1..14: note = Table B: HLA-DQA1*05:05-B1*03:01L HLA-DRB1*15:03L
QAIASEFSSLPSYA

SEQ ID NO: 25519 - protein, 13 aa, Severe acute respiratory syndrome coronavirus 2
  REGION 1..13: note = Table B: HLA-DQA1*05:05-B1*03:01L
AKVTSAMQTMLFT

SEQ ID NO: 25520 - protein, 14 aa, Severe acute respiratory syndrome coronavirus 2
  REGION 1..14: note = Table B: HLA-DQA1*05:05-B1*03:01L
TYASALWEIQQVVD

SEQ ID NO: 25521 - protein, 14 aa, Severe acute respiratory syndrome coronavirus 2
  REGION 1..14: note = Table B: HLA-DQA1*05:05-B1*03:01L
FPKSDGTGTIYTEL

SEQ ID NO: 25522 - protein, 13 aa, Severe acute respiratory syndrome coronavirus 2
  REGION 1..13: note = Table B: HLA-DQA1*05:05-B1*03:01L
ATEVPANSTVLSF

SEQ ID NO: 25523 - protein, 14 aa, Severe acute respiratory syndrome coronavirus 2
  REGION 1..14: note = Table B: HLA-DQA1*05:05-B1*03:01L
TEVPANSTVLSFCA

SEQ ID NO: 25524 - protein, 12 aa, Severe acute respiratory syndrome coronavirus 2
  REGION 1..12: note = Table B: HLA-DQA1*05:05-B1*03:01L
THTGTGQAITVT

SEQ ID NO: 25525 - protein, 12 aa, Severe acute respiratory syndrome coronavirus 2
  REGION 1..12: note = Table B: HLA-DQA1*05:05-B1*03:01L
DQESFGGASCCL

SEQ ID NO: 25526 - protein, 14 aa, Severe acute respiratory syndrome coronavirus 2
  REGION 1..14: note = Table B: HLA-DQA1*05:05-B1*03:01L
QESFGGASCCLYCR

SEQ ID NO: 25527 - protein, 14 aa, Severe acute respiratory syndrome coronavirus 2
  REGION 1..14: note = Table B: HLA-DQA1*05:05-B1*03:01L
NTVCTVCGMWKGYG

SEQ ID NO: 25528 - protein, 12 aa, Severe acute respiratory syndrome coronavirus 2
  REGION 1..12: note = Table B: HLA-DQA1*05:05-B1*03:01L HLA-DRB1*04:08L
NYQHEETIYNLL

SEQ ID NO: 25529 - protein, 14 aa, Severe acute respiratory syndrome coronavirus 2
  REGION 1..14: note = Table B: HLA-DQA1*05:05-B1*03:01L
VENPDILRVYANLG

SEQ ID NO: 25530 - protein, 12 aa, Severe acute respiratory syndrome coronavirus 2
  REGION 1..12: note = Table B: HLA-DQA1*05:05-B1*03:01L
AMRNAGIVGVLT

SEQ ID NO: 25531 - protein, 14 aa, Severe acute respiratory syndrome coronavirus 2
  REGION 1..14: note = Table B: HLA-DQA1*05:05-B1*03:01L
MRNAGIVGVLTLDN

SEQ ID NO: 25532 - protein, 15 aa, Severe acute respiratory syndrome coronavirus 2
  REGION 1..15: note = Table B: HLA-DQA1*05:05-B1*03:01L
WDQTYHPNCVNCLDD

SEQ ID NO: 25533 - protein, 13 aa, Severe acute respiratory syndrome coronavirus 2
  REGION 1..13: note = Table B: HLA-DQA1*05:05-B1*03:01L
VLFSTVFPPTSFG

SEQ ID NO: 25534 - protein, 14 aa, Severe acute respiratory syndrome coronavirus 2
  REGION 1..14: note = Table B: HLA-DQA1*05:05-B1*03:01L
DVNLHSSRLSFKEL

SEQ ID NO: 25535 - protein, 13 aa, Severe acute respiratory syndrome coronavirus 2
  REGION 1..13: note = Table B: HLA-DQA1*05:05-B1*03:01L
FFKEGSSVELKHF

SEQ ID NO: 25536 - protein, 13 aa, Severe acute respiratory syndrome coronavirus 2
  REGION 1..13: note = Table B: HLA-DQA1*05:05-B1*03:01L
LDKSAGFPFNKWG

SEQ ID NO: 25537 - protein, 15 aa, Severe acute respiratory syndrome coronavirus 2
  REGION 1..15: note = Table B: HLA-DQA1*05:05-B1*03:01L
DSMSYEDQDALFAYT

SEQ ID NO: 25538 - protein, 11 aa, Severe acute respiratory syndrome coronavirus 2
  REGION 1..11: note = Table B: HLA-DQA1*05:05-B1*03:01L HLA-DQA1*01:03-B1*06:01L
STMTNRQFHQK

SEQ ID NO: 25539 - protein, 11 aa, Severe acute respiratory syndrome coronavirus 2
  REGION 1..11: note = Table B: HLA-DQA1*05:05-B1*03:01L
SIAATRGATVV

SEQ ID NO: 25540 - protein, 13 aa, Severe acute respiratory syndrome coronavirus 2
  REGION 1..13: note = Table B: HLA-DQA1*05:05-B1*03:01L
LYVKPGGTSSGDA

SEQ ID NO: 25541 - protein, 14 aa, Severe acute respiratory syndrome coronavirus 2
  REGION 1..14: note = Table B: HLA-DQA1*05:05-B1*03:01L
LSDDAVVCFNSTYA

SEQ ID NO: 25542 - protein, 12 aa, Severe acute respiratory syndrome coronavirus 2
  REGION 1..12: note = Table B: HLA-DQA1*05:05-B1*03:01L
QHTMLVKQGDDY

SEQ ID NO: 25543 - protein, 12 aa, Severe acute respiratory syndrome coronavirus 2
  REGION 1..12: note = Table B: HLA-DQA1*05:05-B1*03:01L
TDGTLMIERFVS

SEQ ID NO: 25544 - protein, 14 aa, Severe acute respiratory syndrome coronavirus 2
  REGION 1..14: note = Table B: HLA-DQA1*05:05-B1*03:01L HLA-DQA1*01:03-B1*06:01L HLA-DQA1*02:01-B1*03:03L
ERFVSLAIDAYPLT

SEQ ID NO: 25545 - protein, 13 aa, Severe acute respiratory syndrome coronavirus 2
  REGION 1..13: note = Table B: HLA-DQA1*05:05-B1*03:01L
QAVGACVLCNSQT

SEQ ID NO: 25546 - protein, 13 aa, Severe acute respiratory syndrome coronavirus 2
  REGION 1..13: note = Table B: HLA-DQA1*05:05-B1*03:01L
AVGACVLCNSQTS

SEQ ID NO: 25547 - protein, 14 aa, Severe acute respiratory syndrome coronavirus 2
  REGION 1..14: note = Table B: HLA-DQA1*05:05-B1*03:01L
NPYVCNAPGCDVTD

SEQ ID NO: 25548 - protein, 13 aa, Severe acute respiratory syndrome coronavirus 2
  REGION 1..13: note = Table B: HLA-DQA1*05:05-B1*03:01L
DVTDVTQLYLGGM

SEQ ID NO: 25549 - protein, 16 aa, Severe acute respiratory syndrome coronavirus 2
  REGION 1..16: note = Table B: HLA-DQA1*05:05-B1*03:01L
LYLGGMSYYCKSHKPP

SEQ ID NO: 25550 - protein, 14 aa, Severe acute respiratory syndrome coronavirus 2
  REGION 1..14: note = Table B: HLA-DQA1*05:05-B1*03:01L HLA-DQA1*01:03-B1*06:01L
NVTDFNAIATCDWT

SEQ ID NO: 25551 - protein, 11 aa, Severe acute respiratory syndrome coronavirus 2
  REGION 1..11: note = Table B: HLA-DQA1*05:05-B1*03:01L
SWEVGKPRPPL

SEQ ID NO: 25552 - protein, 14 aa, Severe acute respiratory syndrome coronavirus 2
  REGION 1..14: note = Table B: HLA-DQA1*05:05-B1*03:01L
PETTADIVVFDEIS

SEQ ID NO: 25553 - protein, 18 aa, Severe acute respiratory syndrome coronavirus 2
  REGION 1..18: note = Table B: HLA-DQA1*05:05-B1*03:01L
LEPEYFNSVCRLMKTIGP

SEQ ID NO: 25554 - protein, 12 aa, Severe acute respiratory syndrome coronavirus 2
  REGION 1..12: note = Table B: HLA-DQA1*05:05-B1*03:01L
YNSQNAVASKIL

SEQ ID NO: 25555 - protein, 15 aa, Severe acute respiratory syndrome coronavirus 2
  REGION 1..15: note = Table B: HLA-DQA1*05:05-B1*03:01L HLA-DRB1*10:01L
YRRLISMMGFKMNYQ

SEQ ID NO: 25556 - protein, 14 aa, Severe acute respiratory syndrome coronavirus 2
  REGION 1..14: note = Table B: HLA-DQA1*05:05-B1*03:01L
VGTNLPLQLGFSTG

SEQ ID NO: 25557 - protein, 19 aa, Severe acute respiratory syndrome coronavirus 2
  REGION 1..19: note = Table B: HLA-DQA1*05:05-B1*03:01L
PPGDQFKHLIPLMYKGLPW

SEQ ID NO: 25558 - protein, 12 aa, Severe acute respiratory syndrome coronavirus 2
  REGION 1..12: note = Table B: HLA-DQA1*05:05-B1*03:01L
WAHGFELTSMKY

SEQ ID NO: 25559 - protein, 15 aa, Severe acute respiratory syndrome coronavirus 2
  REGION 1..15: note = Table B: HLA-DQA1*05:05-B1*03:01L
GNLQSNHDLYCQVHG

SEQ ID NO: 25560 - protein, 15 aa, Severe acute respiratory syndrome coronavirus 2
  REGION 1..15: note = Table B: HLA-DQA1*05:05-B1*03:01L
AALLADKFPVLHDIG

SEQ ID NO: 25561 - protein, 14 aa, Severe acute respiratory syndrome coronavirus 2
  REGION 1..14: note = Table B: HLA-DQA1*05:05-B1*03:01L
VDRYPANSIVCRFD

SEQ ID NO: 25562 - protein, 14 aa, Severe acute respiratory syndrome coronavirus 2
  REGION 1..14: note = Table B: HLA-DQA1*05:05-B1*03:01L
YVPLKSATCITRCN

SEQ ID NO: 25563 - protein, 12 aa, Severe acute respiratory syndrome coronavirus 2
  REGION 1..12: note = Table B: HLA-DQA1*05:05-B1*03:01L
FTRLQSLENVAF

SEQ ID NO: 25564 - protein, 12 aa, Severe acute respiratory syndrome coronavirus 2
  REGION 1..12: note = Table B: HLA-DQA1*05:05-B1*03:01L
NKTTLPVNVAFE

SEQ ID NO: 25565 - protein, 13 aa, Severe acute respiratory syndrome coronavirus 2
  REGION 1..13: note = Table B: HLA-DQA1*05:05-B1*03:01L HLA-DQA1*01:03-B1*06:01L
KPTETICAPLTVF

SEQ ID NO: 25566 - protein, 15 aa, Severe acute respiratory syndrome coronavirus 2
  REGION 1..15: note = Table B: HLA-DQA1*05:05-B1*03:01L
FRNARNGVLITEGSV

SEQ ID NO: 25567 - protein, 15 aa, Severe acute respiratory syndrome coronavirus 2
  REGION 1..15: note = Table B: HLA-DQA1*05:05-B1*03:01L
GHVETFYPKLQSSQA

SEQ ID NO: 25568 - protein, 14 aa, Severe acute respiratory syndrome coronavirus 2
  REGION 1..14: note = Table B: HLA-DQA1*05:05-B1*03:01L
MLLEKCDLQNYGDS

SEQ ID NO: 25569 - protein, 16 aa, Severe acute respiratory syndrome coronavirus 2
  REGION 1..16: note = Table B: HLA-DQA1*05:05-B1*03:01L
VDSDLNDFVSDADSTL

SEQ ID NO: 25570 - protein, 16 aa, Severe acute respiratory syndrome coronavirus 2
  REGION 1..16: note = Table B: HLA-DQA1*05:05-B1*03:01L
TEHSWNADLYKLMGHF

SEQ ID NO: 25571 - protein, 16 aa, Severe acute respiratory syndrome coronavirus 2
  REGION 1..16: note = Table B: HLA-DQA1*05:05-B1*03:01L
EHSWNADLYKLMGHFA

SEQ ID NO: 25572 - protein, 12 aa, Severe acute respiratory syndrome coronavirus 2
  REGION 1..12: note = Table B: HLA-DQA1*05:05-B1*03:01L
VMSLKEGQINDM

SEQ ID NO: 25573 - protein, 13 aa, Severe acute respiratory syndrome coronavirus 2
  REGION 1..13: note = Table B: HLA-DQA1*05:05-B1*03:01L
VSSQCVNLTTRTQ

SEQ ID NO: 25574 - protein, 12 aa, Severe acute respiratory syndrome coronavirus 2
  REGION 1..12: note = Table B: HLA-DQA1*05:05-B1*03:01L
RSSVLHSTQDLF

SEQ ID NO: 25575 - protein, 13 aa, Severe acute respiratory syndrome coronavirus 2
  REGION 1..13: note = Table B: HLA-DQA1*05:05-B1*03:01L
NIIRGWIFGTTLD

SEQ ID NO: 25576 - protein, 15 aa, Severe acute respiratory syndrome coronavirus 2
  REGION 1..15: note = Table B: HLA-DQA1*05:05-B1*03:01L
SQPFLMDLEGKQGNF

SEQ ID NO: 25577 - protein, 13 aa, Severe acute respiratory syndrome coronavirus 2
  REGION 1..13: note = Table B: HLA-DQA1*05:05-B1*03:01L
SYLTPGDSSSGWT

SEQ ID NO: 25578 - protein, 14 aa, Severe acute respiratory syndrome coronavirus 2
  REGION 1..14: note = Table B: HLA-DQA1*05:05-B1*03:01L
YLTPGDSSSGWTAG

SEQ ID NO: 25579 - protein, 13 aa, Severe acute respiratory syndrome coronavirus 2
  REGION 1..13: note = Table B: HLA-DQA1*05:05-B1*03:01L
AGSTPCNGVEGFN

SEQ ID NO: 25580 - protein, 12 aa, Severe acute respiratory syndrome coronavirus 2
  REGION 1..12: note = Table B: HLA-DQA1*05:05-B1*03:01L
LSFELLHAPATV

SEQ ID NO: 25581 - protein, 14 aa, Severe acute respiratory syndrome coronavirus 2
  REGION 1..14: note = Table B: HLA-DQA1*05:05-B1*03:01L
SFELLHAPATVCGP

SEQ ID NO: 25582 - protein, 13 aa, Severe acute respiratory syndrome coronavirus 2
  REGION 1..13: note = Table B: HLA-DQA1*05:05-B1*03:01L
TNTSNQVAVLYQD

SEQ ID NO: 25583 - protein, 14 aa, Severe acute respiratory syndrome coronavirus 2
  REGION 1..14: note = Table B: HLA-DQA1*05:05-B1*03:01L
ADQLTPTWRVYSTG

SEQ ID NO: 25584 - protein, 12 aa, Severe acute respiratory syndrome coronavirus 2
  REGION 1..12: note = Table B: HLA-DQA1*05:05-B1*03:01L
DIPIGAGICASY

SEQ ID NO: 25585 - protein, 14 aa, Severe acute respiratory syndrome coronavirus 2
  REGION 1..14: note = Table B: HLA-DQA1*05:05-B1*03:01L
IGAGICASYQTQTN

SEQ ID NO: 25586 - protein, 13 aa, Severe acute respiratory syndrome coronavirus 2
  REGION 1..13: note = Table B: HLA-DQA1*05:05-B1*03:01L
MSLGAENSVAYSN

SEQ ID NO: 25587 - protein, 16 aa, Severe acute respiratory syndrome coronavirus 2
  REGION 1..16: note = Table B: HLA-DQA1*05:05-B1*03:01L
TKTSVDCTMYICGDST

SEQ ID NO: 25588 - protein, 14 aa, Severe acute respiratory syndrome coronavirus 2
  REGION 1..14: note = Table B: HLA-DQA1*05:05-B1*03:01L
GDSTECSNLLLQYG

SEQ ID NO: 25589 - protein, 13 aa, Severe acute respiratory syndrome coronavirus 2
  REGION 1..13: note = Table B: HLA-DQA1*05:05-B1*03:01L
LLLQYGSFCTQLN

SEQ ID NO: 25590 - protein, 13 aa, Severe acute respiratory syndrome coronavirus 2
  REGION 1..13: note = Table B: HLA-DQA1*05:05-B1*03:01L
YGSFCTQLNRALT

SEQ ID NO: 25591 - protein, 11 aa, Severe acute respiratory syndrome coronavirus 2
  REGION 1..11: note = Table B: HLA-DQA1*05:05-B1*03:01L
LLAGTITSGWT

SEQ ID NO: 25592 - protein, 14 aa, Severe acute respiratory syndrome coronavirus 2
  REGION 1..14: note = Table B: HLA-DQA1*05:05-B1*03:01L
TTDNTFVSGNCDVV

SEQ ID NO: 25593 - protein, 13 aa, Severe acute respiratory syndrome coronavirus 2
  REGION 1..13: note = Table B: HLA-DQA1*05:05-B1*03:01L HLA-DQA1*02:01-B1*03:03L
VSGNCDVVIGIVN

SEQ ID NO: 25594 - protein, 14 aa, Severe acute respiratory syndrome coronavirus 2
  REGION 1..14: note = Table B: HLA-DQA1*05:05-B1*03:01L
PDVDLGDISGINAS

SEQ ID NO: 25595 - protein, 15 aa, Severe acute respiratory syndrome coronavirus 2
  REGION 1..15: note = Table B: HLA-DQA1*05:05-B1*03:01L
DATPSDFVRATATIP

SEQ ID NO: 25596 - protein, 14 aa, Severe acute respiratory syndrome coronavirus 2
  REGION 1..14: note = Table B: HLA-DQA1*05:05-B1*03:01L HLA-DQA1*01:03-B1*06:01L HLA-DQA1*02:01-B1*03:03L
EKWESGVKDCVVLH

SEQ ID NO: 25597 - protein, 11 aa, Severe acute respiratory syndrome coronavirus 2
  REGION 1..11: note = Table B: HLA-DQA1*05:05-B1*03:01L
TDTGVEHVTFF

SEQ ID NO: 25598 - protein, 17 aa, Severe acute respiratory syndrome coronavirus 2
  REGION 1..17: note = Table B: HLA-DQA1*05:05-B1*03:01L
DTGVEHVTFFIYNKIVD

SEQ ID NO: 25599 - protein, 13 aa, Severe acute respiratory syndrome coronavirus 2
  REGION 1..13: note = Table B: HLA-DQA1*05:05-B1*03:01L
VQIHTIDGSSGVV

SEQ ID NO: 25600 - protein, 14 aa, Severe acute respiratory syndrome coronavirus 2
  REGION 1..14: note = Table B: HLA-DQA1*05:05-B1*03:01L
SFNPETNILLNVPL

SEQ ID NO: 25601 - protein, 13 aa, Severe acute respiratory syndrome coronavirus 2
  REGION 1..13: note = Table B: HLA-DQA1*05:05-B1*03:01L
NVPLHGTILTRPL

SEQ ID NO: 25602 - protein, 14 aa, Severe acute respiratory syndrome coronavirus 2
  REGION 1..14: note = Table B: HLA-DQA1*05:05-B1*03:01L
VPLHGTILTRPLLE

SEQ ID NO: 25603 - protein, 12 aa, Severe acute respiratory syndrome coronavirus 2
  REGION 1..12: note = Table B: HLA-DQA1*05:05-B1*03:01L HLA-DQA1*02:01-B1*03:03L
TLATCELYHYQE

SEQ ID NO: 25604 - protein, 14 aa, Severe acute respiratory syndrome coronavirus 2
  REGION 1..14: note = Table B: HLA-DQA1*05:05-B1*03:01L HLA-DQA1*01:03-B1*06:01L
YIRVGARKSAPLIE

SEQ ID NO: 25605 - protein, 13 aa, Severe acute respiratory syndrome coronavirus 2
  REGION 1..13: note = Table B: HLA-DQA1*05:05-B1*03:01L
PIQYIDIGNYTVS

SEQ ID NO: 25606 - protein, 14 aa, Severe acute respiratory syndrome coronavirus 2
  REGION 1..14: note = Table B: HLA-DQA1*05:05-B1*03:01L HLA-DQA1*02:01-B1*03:03L
GGPSDSTGSNQNGE

SEQ ID NO: 25607 - protein, 12 aa, Severe acute respiratory syndrome coronavirus 2
  REGION 1..12: note = Table B: HLA-DQA1*05:05-B1*03:01L HLA-DQA1*02:01-B1*03:03L
LKFPRGQGVPIN

SEQ ID NO: 25608 - protein, 10 aa, Severe acute respiratory syndrome coronavirus 2
  REGION 1..10: note = Table B: HLA-DQA1*05:05-B1*03:01L
EAGLPYGANK

SEQ ID NO: 25609 - protein, 16 aa, Severe acute respiratory syndrome coronavirus 2
  REGION 1..16: note = Table B: HLA-DQA1*05:05-B1*03:01L
LNQLESKMSGKGQQQQ

SEQ ID NO: 25610 - protein, 15 aa, Severe acute respiratory syndrome coronavirus 2
  REGION 1..15: note = Table B: HLA-DQA1*05:05-B1*03:01L
IGMEVTPSGTWLTYT

SEQ ID NO: 25611 - protein, 14 aa, Severe acute respiratory syndrome coronavirus 2
  REGION 1..14: note = Table B: HLA-DQA1*05:05-B1*03:01L
EVTPSGTWLTYTGA

SEQ ID NO: 25612 - protein, 14 aa, Severe acute respiratory syndrome coronavirus 2
  REGION 1..14: note = Table B: HLA-DQA1*05:05-B1*03:01L
VTPSGTWLTYTGAI

SEQ ID NO: 25613 - protein, 15 aa, Severe acute respiratory syndrome coronavirus 2
  REGION 1..15: note = Table B: HLA-DQA1*05:05-B1*03:01L HLA-DQA1*01:03-B1*06:01L
KQLQQSMSSADSTQA

SEQ ID NO: 25614 - protein, 12 aa, Severe acute respiratory syndrome coronavirus 2
  REGION 1..12: note = Table B: HLA-DRB1*14:17L
KGVLPQLEQPYV

SEQ ID NO: 25615 - protein, 11 aa, Severe acute respiratory syndrome coronavirus 2
  REGION 1..11: note = Table B: HLA-DRB1*14:17L HLA-DRB1*04:08L
IQYGRSGETLG

SEQ ID NO: 25616 - protein, 11 aa, Severe acute respiratory syndrome coronavirus 2
  REGION 1..11: note = Table B: HLA-DRB1*14:17L
SIFSRTLETAQ

SEQ ID NO: 25617 - protein, 13 aa, Severe acute respiratory syndrome coronavirus 2
  REGION 1..13: note = Table B: HLA-DRB1*14:17L HLA-DPA1*01:02-B1*04:01L HLA-DRB1*08:03L
GGQIVTCAKEIKE

SEQ ID NO: 25618 - protein, 12 aa, Severe acute respiratory syndrome coronavirus 2
  REGION 1..12: note = Table B: HLA-DRB1*14:17L
VVADAVIKTLQP

SEQ ID NO: 25619 - protein, 12 aa, Severe acute respiratory syndrome coronavirus 2
  REGION 1..12: note = Table B: HLA-DRB1*14:17L
SGYLKLTDNVYI

SEQ ID NO: 25620 - protein, 12 aa, Severe acute respiratory syndrome coronavirus 2
  REGION 1..12: note = Table B: HLA-DRB1*14:17L
GADVTKIKPHNS

SEQ ID NO: 25621 - protein, 11 aa, Severe acute respiratory syndrome coronavirus 2
  REGION 1..11: note = Table B: HLA-DRB1*14:17L
IKFADDLNQLT

SEQ ID NO: 25622 - protein, 11 aa, Severe acute respiratory syndrome coronavirus 2
  REGION 1..11: note = Table B: HLA-DRB1*14:17L
LTGYKKPASRE

SEQ ID NO: 25623 - protein, 13 aa, Severe acute respiratory syndrome coronavirus 2
  REGION 1..13: note = Table B: HLA-DRB1*14:17L HLA-DRB1*16:01L
TTEVVGDIILKPA

SEQ ID NO: 25624 - protein, 12 aa, Severe acute respiratory syndrome coronavirus 2
  REGION 1..12: note = Table B: HLA-DRB1*14:17L
NNSLKITEEVGH

SEQ ID NO: 25625 - protein, 12 aa, Severe acute respiratory syndrome coronavirus 2
  REGION 1..12: note = Table B: HLA-DRB1*14:17L
SSAKSASVYYSQ

SEQ ID NO: 25626 - protein, 13 aa, Severe acute respiratory syndrome coronavirus 2
  REGION 1..13: note = Table B: HLA-DRB1*14:17L
LDQALVSDVGDSA

SEQ ID NO: 25627 - protein, 12 aa, Severe acute respiratory syndrome coronavirus 2
  REGION 1..12: note = Table B: HLA-DRB1*14:17L
ALVSDVGDSAEV

SEQ ID NO: 25628 - protein, 13 aa, Severe acute respiratory syndrome coronavirus 2
  REGION 1..13: note = Table B: HLA-DRB1*14:17L
TRDIASTDTCFAN

SEQ ID NO: 25629 - protein, 13 aa, Severe acute respiratory syndrome coronavirus 2
  REGION 1..13: note = Table B: HLA-DRB1*14:17L HLA-DRB1*16:01L
ADFDTWFSQRGGS

SEQ ID NO: 25630 - protein, 13 aa, Severe acute respiratory syndrome coronavirus 2
  REGION 1..13: note = Table B: HLA-DRB1*14:17L
IGALDISASIVAG

SEQ ID NO: 25631 - protein, 13 aa, Severe acute respiratory syndrome coronavirus 2
  REGION 1..13: note = Table B: HLA-DRB1*14:17L
GALDISASIVAGG

SEQ ID NO: 25632 - protein, 11 aa, Severe acute respiratory syndrome coronavirus 2
  REGION 1..11: note = Table B: HLA-DRB1*14:17L
DVLLPLTQYNR

SEQ ID NO: 25633 - protein, 12 aa, Severe acute respiratory syndrome coronavirus 2
  REGION 1..12: note = Table B: HLA-DRB1*14:17L
HVDILGPLSAQT

SEQ ID NO: 25634 - protein, 11 aa, Severe acute respiratory syndrome coronavirus 2
  REGION 1..11: note = Table B: HLA-DRB1*14:17L
IKVATVQSKMS

SEQ ID NO: 25635 - protein, 11 aa, Severe acute respiratory syndrome coronavirus 2
  REGION 1..11: note = Table B: HLA-DRB1*14:17L
ELSPVALRQMS

SEQ ID NO: 25636 - protein, 12 aa, Severe acute respiratory syndrome coronavirus 2
  REGION 1..12: note = Table B: HLA-DRB1*14:17L
ATEVPANSTVLS

SEQ ID NO: 25637 - protein, 13 aa, Severe acute respiratory syndrome coronavirus 2
  REGION 1..13: note = Table B: HLA-DRB1*14:17L HLA-DRB1*04:08L
AAKAYKDYLASGG

SEQ ID NO: 25638 - protein, 10 aa, Severe acute respiratory syndrome coronavirus 2
  REGION 1..10: note = Table B: HLA-DRB1*14:17L
LRVYANLGER

SEQ ID NO: 25639 - protein, 11 aa, Severe acute respiratory syndrome coronavirus 2
  REGION 1..11: note = Table B: HLA-DRB1*14:17L
ANVNALLSTDG

SEQ ID NO: 25640 - protein, 10 aa, Severe acute respiratory syndrome coronavirus 2
  REGION 1..10: note = Table B: HLA-DRB1*14:17L
LQGPPGTGKS

SEQ ID NO: 25641 - protein, 11 aa, Severe acute respiratory syndrome coronavirus 2
  REGION 1..11: note = Table B: HLA-DRB1*14:17L
FKVNSTLEQYV

SEQ ID NO: 25642 - protein, 13 aa, Severe acute respiratory syndrome coronavirus 2
  REGION 1..13: note = Table B: HLA-DRB1*14:17L HLA-DRB1*04:08L
NYQVNGYPNMFIT

SEQ ID NO: 25643 - protein, 11 aa, Severe acute respiratory syndrome coronavirus 2
  REGION 1..11: note = Table B: HLA-DRB1*14:17L
HAIHVSGTNGT

SEQ ID NO: 25644 - protein, 11 aa, Severe acute respiratory syndrome coronavirus 2
  REGION 1..11: note = Table B: HLA-DRB1*14:17L
TTLDSKTQSLL

SEQ ID NO: 25645 - protein, 13 aa, Severe acute respiratory syndrome coronavirus 2
  REGION 1..13: note = Table B: HLA-DRB1*14:17L
GGVSVITPGTNTS

SEQ ID NO: 25646 - protein, 15 aa, Severe acute respiratory syndrome coronavirus 2
  REGION 1..15: note = Table B: HLA-DRB1*14:17L
AGFIKQYGDCLGDIA

SEQ ID NO: 25647 - protein, 15 aa, Severe acute respiratory syndrome coronavirus 2
  REGION 1..15: note = Table B: HLA-DRB1*14:17L
LPPLLTDEMIAQYTS

SEQ ID NO: 25648 - protein, 12 aa, Severe acute respiratory syndrome coronavirus 2
  REGION 1..12: note = Table B: HLA-DRB1*14:17L
QGEIKDATPSDF

SEQ ID NO: 25649 - protein, 11 aa, Severe acute respiratory syndrome coronavirus 2
  REGION 1..11: note = Table B: HLA-DRB1*14:17L
YVYSRVKNLNS

SEQ ID NO: 25650 - protein, 11 aa, Severe acute respiratory syndrome coronavirus 2
  REGION 1..11: note = Table B: HLA-DRB1*14:17L
YSRVKNLNSSR

SEQ ID NO: 25651 - protein, 11 aa, Severe acute respiratory syndrome coronavirus 2
  REGION 1..11: note = Table B: HLA-DRB1*14:17L
YRINWITGGIA

SEQ ID NO: 25652 - protein, 11 aa, Severe acute respiratory syndrome coronavirus 2
  REGION 1..11: note = Table B: HLA-DRB1*14:17L HLA-DQA1*02:01-B1*03:03L
SELVIGAVILR

SEQ ID NO: 25653 - protein, 13 aa, Severe acute respiratory syndrome coronavirus 2
  REGION 1..13: note = Table B: HLA-DRB1*14:17L
ASQRVAGDSGFAA

SEQ ID NO: 25654 - protein, 11 aa, Severe acute respiratory syndrome coronavirus 2
  REGION 1..11: note = Table B: HLA-DRB1*14:17L
IKNLSKSLTEN

SEQ ID NO: 25655 - protein, 11 aa, Severe acute respiratory syndrome coronavirus 2
  REGION 1..11: note = Table B: HLA-DPA1*01:02-B1*04:01L HLA-DQA1*02:01-B1*03:03L HLA-DRB1*15:03L
GEIPVAYRKVL

SEQ ID NO: 25656 - protein, 12 aa, Severe acute respiratory syndrome coronavirus 2
  REGION 1..12: note = Table B: HLA-DPA1*01:02-B1*04:01L
SEVGPEHSLAEY

SEQ ID NO: 25657 - protein, 11 aa, Severe acute respiratory syndrome coronavirus 2
  REGION 1..11: note = Table B: HLA-DPA1*01:02-B1*04:01L HLA-DQA1*01:03-B1*06:01L
LNDNLLEILQK

SEQ ID NO: 25658 - protein, 10 aa, Severe acute respiratory syndrome coronavirus 2
  REGION 1..10: note = Table B: HLA-DPA1*01:02-B1*04:01L
DYKAFKQIVE

SEQ ID NO: 25659 - protein, 11 aa, Severe acute respiratory syndrome coronavirus 2
  REGION 1..11: note = Table B: HLA-DPA1*01:02-B1*04:01L
SEAARVVRSIF

SEQ ID NO: 25660 - protein, 10 aa, Severe acute respiratory syndrome coronavirus 2
  REGION 1..10: note = Table B: HLA-DPA1*01:02-B1*04:01L
FGTVYEKLKP

SEQ ID NO: 25661 - protein, 10 aa, Severe acute respiratory syndrome coronavirus 2
  REGION 1..10: note = Table B: HLA-DPA1*01:02-B1*04:01L
GTVYEKLKPV

SEQ ID NO: 25662 - protein, 10 aa, Severe acute respiratory syndrome coronavirus 2
  REGION 1..10: note = Table B: HLA-DPA1*01:02-B1*04:01L
DWLEEKFKEG

SEQ ID NO: 25663 - protein, 10 aa, Severe acute respiratory syndrome coronavirus 2
  REGION 1..10: note = Table B: HLA-DPA1*01:02-B1*04:01L
SVQTFFKLVN

SEQ ID NO: 25664 - protein, 10 aa, Severe acute respiratory syndrome coronavirus 2
  REGION 1..10: note = Table B: HLA-DPA1*01:02-B1*04:01L HLA-DRB1*16:01L HLA-DQA1*01:03-B1*06:01L HLA-DRB1*15:03L
TFFKLVNKFL

SEQ ID NO: 25665 - protein, 10 aa, Severe acute respiratory syndrome coronavirus 2
  REGION 1..10: note = Table B: HLA-DPA1*01:02-B1*04:01L HLA-DQA1*01:03-B1*06:01L
SFSGYLKLTD

SEQ ID NO: 25666 - protein, 10 aa, Severe acute respiratory syndrome coronavirus 2
  REGION 1..10: note = Table B: HLA-DPA1*01:02-B1*04:01L
RVEAFEYYHT

SEQ ID NO: 25667 - protein, 11 aa, Severe acute respiratory syndrome coronavirus 2
  REGION 1..11: note = Table B: HLA-DPA1*01:02-B1*04:01L HLA-DQA1*02:01-B1*03:03L
ETMSYLFQHAN

SEQ ID NO: 25668 - protein, 12 aa, Severe acute respiratory syndrome coronavirus 2
  REGION 1..12: note = Table B: HLA-DPA1*01:02-B1*04:01L HLA-DRB1*16:01L
TGNYQCGHYKHI

SEQ ID NO: 25669 - protein, 10 aa, Severe acute respiratory syndrome coronavirus 2
  REGION 1..10: note = Table B: HLA-DPA1*01:02-B1*04:01L
YQCGHYKHIT

SEQ ID NO: 25670 - protein, 14 aa, Severe acute respiratory syndrome coronavirus 2
  REGION 1..14: note = Table B: HLA-DPA1*01:02-B1*04:01L
TSNSFDVLKSEDAQ

SEQ ID NO: 25671 - protein, 13 aa, Severe acute respiratory syndrome coronavirus 2
  REGION 1..13: note = Table B: HLA-DPA1*01:02-B1*04:01L
TIAKNTVKSVGKF

SEQ ID NO: 25672 - protein, 10 aa, Severe acute respiratory syndrome coronavirus 2
  REGION 1..10: note = Table B: HLA-DPA1*01:02-B1*04:01L
ITISSFKWDL

SEQ ID NO: 25673 - protein, 10 aa, Severe acute respiratory syndrome coronavirus 2
  REGION 1..10: note = Table B: HLA-DPA1*01:02-B1*04:01L HLA-DRB1*16:01L
FYYVWKSYVH

SEQ ID NO: 25674 - protein, 10 aa, Severe acute respiratory syndrome coronavirus 2
  REGION 1..10: note = Table B: HLA-DPA1*01:02-B1*04:01L
VWKSYVHVVD

SEQ ID NO: 25675 - protein, 11 aa, Severe acute respiratory syndrome coronavirus 2
  REGION 1..11: note = Table B: HLA-DPA1*01:02-B1*04:01L
HINAQVAKSHN

SEQ ID NO: 25676 - protein, 11 aa, Severe acute respiratory syndrome coronavirus 2
  REGION 1..11: note = Table B: HLA-DPA1*01:02-B1*04:01L HLA-DQA1*01:03-B1*06:01L
TNGDFLHFLPR

SEQ ID NO: 25677 - protein, 10 aa, Severe acute respiratory syndrome coronavirus 2
  REGION 1..10: note = Table B: HLA-DPA1*01:02-B1*04:01L
FLPRVFSAVG

SEQ ID NO: 25678 - protein, 11 aa, Severe acute respiratory syndrome coronavirus 2
  REGION 1..11: note = Table B: HLA-DPA1*01:02-B1*04:01L
LAYYFMRFRRA

SEQ ID NO: 25679 - protein, 12 aa, Severe acute respiratory syndrome coronavirus 2
  REGION 1..12: note = Table B: HLA-DPA1*01:02-B1*04:01L
ISTKHFYWFFSN

SEQ ID NO: 25680 - protein, 11 aa, Severe acute respiratory syndrome coronavirus 2
  REGION 1..11: note = Table B: HLA-DPA1*01:02-B1*04:01L
GVSFSTFEEAA

SEQ ID NO: 25681 - protein, 10 aa, Severe acute respiratory syndrome coronavirus 2
  REGION 1..10: note = Table B: HLA-DPA1*01:02-B1*04:01L
LPLTQYNRYL

SEQ ID NO: 25682 - protein, 11 aa, Severe acute respiratory syndrome coronavirus 2
  REGION 1..11: note = Table B: HLA-DPA1*01:02-B1*04:01L
YDCVSFCYMHH

SEQ ID NO: 25683 - protein, 10 aa, Severe acute respiratory syndrome coronavirus 2
  REGION 1..10: note = Table B: HLA-DPA1*01:02-B1*04:01L
RWFLNRFTTT

SEQ ID NO: 25684 - protein, 10 aa, Severe acute respiratory syndrome coronavirus 2
  REGION 1..10: note = Table B: HLA-DPA1*01:02-B1*04:01L
RVWTLMNVLT

SEQ ID NO: 25685 - protein, 11 aa, Severe acute respiratory syndrome coronavirus 2
  REGION 1..11: note = Table B: HLA-DPA1*01:02-B1*04:01L
TLVYKVYYGNA

SEQ ID NO: 25686 - protein, 10 aa, Severe acute respiratory syndrome coronavirus 2
  REGION 1..10: note = Table B: HLA-DPA1*01:02-B1*04:01L HLA-DQA1*01:03-B1*06:01L
VSTQEFRYMN

SEQ ID NO: 25687 - protein, 16 aa, Severe acute respiratory syndrome coronavirus 2
  REGION 1..16: note = Table B: HLA-DPA1*01:02-B1*04:01L
TAQEAYEQAVANGDSE

SEQ ID NO: 25688 - protein, 10 aa, Severe acute respiratory syndrome coronavirus 2
  REGION 1..10: note = Table B: HLA-DPA1*01:02-B1*04:01L
MLFTMLRKLD

SEQ ID NO: 25689 - protein, 16 aa, Severe acute respiratory syndrome coronavirus 2
  REGION 1..16: note = Table B: HLA-DPA1*01:02-B1*04:01L
ASALWEIQQVVDADSK

SEQ ID NO: 25690 - protein, 11 aa, Severe acute respiratory syndrome coronavirus 2
  REGION 1..11: note = Table B: HLA-DPA1*01:02-B1*04:01L HLA-DRB1*07:01L HLA-DQA1*01:03-B1*06:01L
QVVDADSKIVQ

SEQ ID NO: 25691 - protein, 15 aa, Severe acute respiratory syndrome coronavirus 2
  REGION 1..15: note = Table B: HLA-DPA1*01:02-B1*04:01L
TDDNALAYYNTTKGG

SEQ ID NO: 25692 - protein, 11 aa, Severe acute respiratory syndrome coronavirus 2
  REGION 1..11: note = Table B: HLA-DPA1*01:02-B1*04:01L
DLQDLKWARFP

SEQ ID NO: 25693 - protein, 11 aa, Severe acute respiratory syndrome coronavirus 2
  REGION 1..11: note = Table B: HLA-DPA1*01:02-B1*04:01L
LQDLKWARFPK

SEQ ID NO: 25694 - protein, 10 aa, Severe acute respiratory syndrome coronavirus 2
  REGION 1..10: note = Table B: HLA-DPA1*01:02-B1*04:01L
LKWARFPKSD

SEQ ID NO: 25695 - protein, 11 aa, Severe acute respiratory syndrome coronavirus 2
  REGION 1..11: note = Table B: HLA-DPA1*01:02-B1*04:01L HLA-DQA1*01:03-B1*06:01L
NATEVPANSTV

SEQ ID NO: 25696 - protein, 11 aa, Severe acute respiratory syndrome coronavirus 2
  REGION 1..11: note = Table B: HLA-DPA1*01:02-B1*04:01L
DVVYRAFDIYN

SEQ ID NO: 25697 - protein, 11 aa, Severe acute respiratory syndrome coronavirus 2
  REGION 1..11: note = Table B: HLA-DPA1*01:02-B1*04:01L
VVYRAFDIYND

SEQ ID NO: 25698 - protein, 11 aa, Severe acute respiratory syndrome coronavirus 2
  REGION 1..11: note = Table B: HLA-DPA1*01:02-B1*04:01L
KVAGFAKFLKT

SEQ ID NO: 25699 - protein, 11 aa, Severe acute respiratory syndrome coronavirus 2
  REGION 1..11: note = Table B: HLA-DPA1*01:02-B1*04:01L
YTMADLVYALR

SEQ ID NO: 25700 - protein, 11 aa, Severe acute respiratory syndrome coronavirus 2
  REGION 1..11: note = Table B: HLA-DPA1*01:02-B1*04:01L
LKTVQFCDAMR

SEQ ID NO: 25701 - protein, 10 aa, Severe acute respiratory syndrome coronavirus 2
  REGION 1..10: note = Table B: HLA-DPA1*01:02-B1*04:01L
YHFRELGVVH

SEQ ID NO: 25702 - protein, 12 aa, Severe acute respiratory syndrome coronavirus 2
  REGION 1..12: note = Table B: HLA-DPA1*01:02-B1*04:01L HLA-DRB1*16:01L
FNKDFYDFAVSK

SEQ ID NO: 25703 - protein, 10 aa, Severe acute respiratory syndrome coronavirus 2
  REGION 1..10: note = Table B: HLA-DPA1*01:02-B1*04:01L
YDYYRYNLPT

SEQ ID NO: 25704 - protein, 10 aa, Severe acute respiratory syndrome coronavirus 2
  REGION 1..10: note = Table B: HLA-DPA1*01:02-B1*04:01L
FYGGWHNMLK

SEQ ID NO: 25705 - protein, 17 aa, Severe acute respiratory syndrome coronavirus 2
  REGION 1..17: note = Table B: HLA-DPA1*01:02-B1*04:01L
MPNMLRIMASLVLARKH

SEQ ID NO: 25706 - protein, 16 aa, Severe acute respiratory syndrome coronavirus 2
  REGION 1..16: note = Table B: HLA-DPA1*01:02-B1*04:01L HLA-DRB1*10:01L
HRFYRLANECAQVLSE

SEQ ID NO: 25707 - protein, 10 aa, Severe acute respiratory syndrome coronavirus 2
  REGION 1..10: note = Table B: HLA-DPA1*01:02-B1*04:01L
VNEFYAYLRK

SEQ ID NO: 25708 - protein, 10 aa, Severe acute respiratory syndrome coronavirus 2
  REGION 1..10: note = Table B: HLA-DPA1*01:02-B1*04:01L
NEFYAYLRKH

SEQ ID NO: 25709 - protein, 10 aa, Severe acute respiratory syndrome coronavirus 2
  REGION 1..10: note = Table B: HLA-DPA1*01:02-B1*04:01L
FKSVLYYQNN

SEQ ID NO: 25710 - protein, 15 aa, Severe acute respiratory syndrome coronavirus 2
  REGION 1..15: note = Table B: HLA-DPA1*01:02-B1*04:01L
VKQGDDYVYLPYPDP

SEQ ID NO: 25711 - protein, 10 aa, Severe acute respiratory syndrome coronavirus 2
  REGION 1..10: note = Table B: HLA-DPA1*01:02-B1*04:01L
VFHLYLQYIR

SEQ ID NO: 25712 - protein, 11 aa, Severe acute respiratory syndrome coronavirus 2
  REGION 1..11: note = Table B: HLA-DPA1*01:02-B1*04:01L
VMLTNDNTSRY

SEQ ID NO: 25713 - protein, 11 aa, Severe acute respiratory syndrome coronavirus 2
  REGION 1..11: note = Table B: HLA-DPA1*01:02-B1*04:01L
DAVVYRGTTTY

SEQ ID NO: 25714 - protein, 11 aa, Severe acute respiratory syndrome coronavirus 2
  REGION 1..11: note = Table B: HLA-DPA1*01:02-B1*04:01L
AVVYRGTTTYK

SEQ ID NO: 25715 - protein, 10 aa, Severe acute respiratory syndrome coronavirus 2
  REGION 1..10: note = Table B: HLA-DPA1*01:02-B1*04:01L
VGDYFVLTSH

SEQ ID NO: 25716 - protein, 10 aa, Severe acute respiratory syndrome coronavirus 2
  REGION 1..10: note = Table B: HLA-DPA1*01:02-B1*04:01L
LRAKHYVYIG

SEQ ID NO: 25717 - protein, 13 aa, Severe acute respiratory syndrome coronavirus 2
  REGION 1..13: note = Table B: HLA-DPA1*01:02-B1*04:01L HLA-DRB1*10:01L HLA-DRB1*08:03L
SALVYDNKLKAHK

SEQ ID NO: 25718 - protein, 10 aa, Severe acute respiratory syndrome coronavirus 2
  REGION 1..10: note = Table B: HLA-DPA1*01:02-B1*04:01L
VTGLFKDCSK

SEQ ID NO: 25719 - protein, 12 aa, Severe acute respiratory syndrome coronavirus 2
  REGION 1..12: note = Table B: HLA-DPA1*01:02-B1*04:01L HLA-DRB1*04:08L
DQFKHLIPLMYK

SEQ ID NO: 25720 - protein, 11 aa, Severe acute respiratory syndrome coronavirus 2
  REGION 1..11: note = Table B: HLA-DPA1*01:02-B1*04:01L
VQMLSDTLKNL

SEQ ID NO: 25721 - protein, 11 aa, Severe acute respiratory syndrome coronavirus 2
  REGION 1..11: note = Table B: HLA-DPA1*01:02-B1*04:01L
DRVVFVLWAHG

SEQ ID NO: 25722 - protein, 11 aa, Severe acute respiratory syndrome coronavirus 2
  REGION 1..11: note = Table B: HLA-DPA1*01:02-B1*04:01L
FELTSMKYFVK

SEQ ID NO: 25723 - protein, 11 aa, Severe acute respiratory syndrome coronavirus 2
  REGION 1..11: note = Table B: HLA-DPA1*01:02-B1*04:01L
SMKYFVKIGPE

SEQ ID NO: 25724 - protein, 17 aa, Severe acute respiratory syndrome coronavirus 2
  REGION 1..17: note = Table B: HLA-DPA1*01:02-B1*04:01L
DTRVLSNLNLPGCDGGS

SEQ ID NO: 25725 - protein, 13 aa, Severe acute respiratory syndrome coronavirus 2
  REGION 1..13: note = Table B: HLA-DPA1*01:02-B1*04:01L
SAGFSLWVYKQFD

SEQ ID NO: 25726 - protein, 10 aa, Severe acute respiratory syndrome coronavirus 2
  REGION 1..10: note = Table B: HLA-DPA1*01:02-B1*04:01L
LWNTFTRLQS

SEQ ID NO: 25727 - protein, 10 aa, Severe acute respiratory syndrome coronavirus 2
  REGION 1..10: note = Table B: HLA-DPA1*01:02-B1*04:01L
WNTFTRLQSL

SEQ ID NO: 25728 - protein, 10 aa, Severe acute respiratory syndrome coronavirus 2
  REGION 1..10: note = Table B: HLA-DPA1*01:02-B1*04:01L
VAFELWAKRN

SEQ ID NO: 25729 - protein, 10 aa, Severe acute respiratory syndrome coronavirus 2
  REGION 1..10: note = Table B: HLA-DPA1*01:02-B1*04:01L
TQFNYYKKVD

SEQ ID NO: 25730 - protein, 10 aa, Severe acute respiratory syndrome coronavirus 2
  REGION 1..10: note = Table B: HLA-DPA1*01:02-B1*04:01L
FEHIVYGDFS

SEQ ID NO: 25731 - protein, 10 aa, Severe acute respiratory syndrome coronavirus 2
  REGION 1..10: note = Table B: HLA-DPA1*01:02-B1*04:01L
RFKESPFELE

SEQ ID NO: 25732 - protein, 10 aa, Severe acute respiratory syndrome coronavirus 2
  REGION 1..10: note = Table B: HLA-DPA1*01:02-B1*04:01L
FKESPFELED

SEQ ID NO: 25733 - protein, 11 aa, Severe acute respiratory syndrome coronavirus 2
  REGION 1..11: note = Table B: HLA-DPA1*01:02-B1*04:01L
ISFMLWCKDGH

SEQ ID NO: 25734 - protein, 17 aa, Severe acute respiratory syndrome coronavirus 2
  REGION 1..17: note = Table B: HLA-DPA1*01:02-B1*04:01L
DADSTLIGDCATVHTAN

SEQ ID NO: 25735 - protein, 13 aa, Severe acute respiratory syndrome coronavirus 2
  REGION 1..13: note = Table B: HLA-DPA1*01:02-B1*04:01L
WDLIISDMYDPKT

SEQ ID NO: 25736 - protein, 11 aa, Severe acute respiratory syndrome coronavirus 2
  REGION 1..11: note = Table B: HLA-DPA1*01:02-B1*04:01L
YVMHANYIFWR

SEQ ID NO: 25737 - protein, 11 aa, Severe acute respiratory syndrome coronavirus 2
  REGION 1..11: note = Table B: HLA-DPA1*01:02-B1*04:01L
KVFRSSVLHST

SEQ ID NO: 25738 - protein, 10 aa, Severe acute respiratory syndrome coronavirus 2
  REGION 1..10: note = Table B: HLA-DPA1*01:02-B1*04:01L
SNVTWFHAIH

SEQ ID NO: 25739 - protein, 10 aa, Severe acute respiratory syndrome coronavirus 2
  REGION 1..10: note = Table B: HLA-DPA1*01:02-B1*04:01L HLA-DQA1*01:03-B1*06:01L
IIRGWIFGTT

SEQ ID NO: 25740 - protein, 12 aa, Severe acute respiratory syndrome coronavirus 2
  REGION 1..12: note = Table B: HLA-DPA1*01:02-B1*04:01L HLA-DQA1*01:03-B1*06:01L
FQFCNDPFLGVY

SEQ ID NO: 25741 - protein, 12 aa, Severe acute respiratory syndrome coronavirus 2
  REGION 1..12: note = Table B: HLA-DPA1*01:02-B1*04:01L HLA-DRB1*04:08L
FCNDPFLGVYYH

SEQ ID NO: 25742 - protein, 10 aa, Severe acute respiratory syndrome coronavirus 2
  REGION 1..10: note = Table B: HLA-DPA1*01:02-B1*04:01L
PFLGVYYHKN

SEQ ID NO: 25743 - protein, 10 aa, Severe acute respiratory syndrome coronavirus 2
  REGION 1..10: note = Table B: HLA-DPA1*01:02-B1*04:01L
FLGVYYHKNN

SEQ ID NO: 25744 - protein, 12 aa, Severe acute respiratory syndrome coronavirus 2
  REGION 1..12: note = Table B: HLA-DPA1*01:02-B1*04:01L
KNLREFVFKNID

SEQ ID NO: 25745 - protein, 10 aa, Severe acute respiratory syndrome coronavirus 2
  REGION 1..10: note = Table B: HLA-DPA1*01:02-B1*04:01L
YQTSNFRVQP

SEQ ID NO: 25746 - protein, 11 aa, Severe acute respiratory syndrome coronavirus 2
  REGION 1..11: note = Table B: HLA-DPA1*01:02-B1*04:01L
YNYLYRLFRKS

SEQ ID NO: 25747 - protein, 10 aa, Severe acute respiratory syndrome coronavirus 2
  REGION 1..10: note = Table B: HLA-DPA1*01:02-B1*04:01L HLA-DRB1*16:01L HLA-DRB1*04:08L
YLYRLFRKSN

SEQ ID NO: 25748 - protein, 17 aa, Severe acute respiratory syndrome coronavirus 2
  REGION 1..17: note = Table B: HLA-DPA1*01:02-B1*04:01L
ISTEIYQAGSTPCNGVE

SEQ ID NO: 25749 - protein, 10 aa, Severe acute respiratory syndrome coronavirus 2
  REGION 1..10: note = Table B: HLA-DPA1*01:02-B1*04:01L
VVVLSFELLH

SEQ ID NO: 25750 - protein, 10 aa, Severe acute respiratory syndrome coronavirus 2
  REGION 1..10: note = Table B: HLA-DPA1*01:02-B1*04:01L
ICAQKFNGLT

SEQ ID NO: 25751 - protein, 10 aa, Severe acute respiratory syndrome coronavirus 2
  REGION 1..10: note = Table B: HLA-DPA1*01:02-B1*04:01L
PHGVVFLHVT

SEQ ID NO: 25752 - protein, 10 aa, Severe acute respiratory syndrome coronavirus 2
  REGION 1..10: note = Table B: HLA-DPA1*01:02-B1*04:01L
FLHVTYVPAQ

SEQ ID NO: 25753 - protein, 11 aa, Severe acute respiratory syndrome coronavirus 2
  REGION 1..11: note = Table B: HLA-DPA1*01:02-B1*04:01L
NGTHWFVTQRN

SEQ ID NO: 25754 - protein, 11 aa, Severe acute respiratory syndrome coronavirus 2
  REGION 1..11: note = Table B: HLA-DPA1*01:02-B1*04:01L
GTHWFVTQRNF

SEQ ID NO: 25755 - protein, 10 aa, Severe acute respiratory syndrome coronavirus 2
  REGION 1..10: note = Table B: HLA-DPA1*01:02-B1*04:01L
YTEKWESGVK

SEQ ID NO: 25756 - protein, 11 aa, Severe acute respiratory syndrome coronavirus 2
  REGION 1..11: note = Table B: HLA-DPA1*01:02-B1*04:01L
YFTSDYYQLYS

SEQ ID NO: 25757 - protein, 13 aa, Severe acute respiratory syndrome coronavirus 2
  REGION 1..13: note = Table B: HLA-DPA1*01:02-B1*04:01L
TGVEHVTFFIYNK

SEQ ID NO: 25758 - protein, 12 aa, Severe acute respiratory syndrome coronavirus 2
  REGION 1..12: note = Table B: HLA-DPA1*01:02-B1*04:01L
VKPSFYVYSRVK

SEQ ID NO: 25759 - protein, 10 aa, Severe acute respiratory syndrome coronavirus 2
  REGION 1..10: note = Table B: HLA-DPA1*01:02-B1*04:01L HLA-DQA1*01:03-B1*06:01L
FYVYSRVKNL

SEQ ID NO: 25760 - protein, 11 aa, Severe acute respiratory syndrome coronavirus 2
  REGION 1..11: note = Table B: HLA-DPA1*01:02-B1*04:01L
ITVEELKKLLE

SEQ ID NO: 25761 - protein, 10 aa, Severe acute respiratory syndrome coronavirus 2
  REGION 1..10: note = Table B: HLA-DPA1*01:02-B1*04:01L
NRNRFLYIIK

SEQ ID NO: 25762 - protein, 11 aa, Severe acute respiratory syndrome coronavirus 2
  REGION 1..11: note = Table B: HLA-DPA1*01:02-B1*04:01L
FIASFRLFART

SEQ ID NO: 25763 - protein, 12 aa, Severe acute respiratory syndrome coronavirus 2
  REGION 1..12: note = Table B: HLA-DPA1*01:02-B1*04:01L
AEILLIIMRTFK

SEQ ID NO: 25764 - protein, 15 aa, Severe acute respiratory syndrome coronavirus 2
  REGION 1..15: note = Table B: HLA-DPA1*01:02-B1*04:01L HLA-DRB1*16:01L HLA-DRB1*04:08L
LPNNTASWFTALTQH

SEQ ID NO: 25765 - protein, 12 aa, Severe acute respiratory syndrome coronavirus 2
  REGION 1..12: note = Table B: HLA-DPA1*01:02-B1*04:01L
TNSSPDDQIGYY

SEQ ID NO: 25766 - protein, 10 aa, Severe acute respiratory syndrome coronavirus 2
  REGION 1..10: note = Table B: HLA-DPA1*01:02-B1*04:01L
LALLLLDRLN

SEQ ID NO: 25767 - protein, 11 aa, Severe acute respiratory syndrome coronavirus 2
  REGION 1..11: note = Table B: HLA-DPA1*01:02-B1*04:01L
ASAFFGMSRIG

SEQ ID NO: 25768 - protein, 11 aa, Severe acute respiratory syndrome coronavirus 2
  REGION 1..11: note = Table B: HLA-DPA1*01:02-B1*04:01L
FKDQVILLNKH

SEQ ID NO: 25769 - protein, 16 aa, Severe acute respiratory syndrome coronavirus 2
  REGION 1..16: note = Table B: HLA-DRB1*07:01L
DSVEEVLSEARQHLKD

SEQ ID NO: 25770 - protein, 14 aa, Severe acute respiratory syndrome coronavirus 2
  REGION 1..14: note = Table B: HLA-DRB1*07:01L
LVPHVGEIPVAYRK

SEQ ID NO: 25771 - protein, 17 aa, Severe acute respiratory syndrome coronavirus 2
  REGION 1..17: note = Table B: HLA-DRB1*07:01L
IGEQKSILSPLYAFASE

SEQ ID NO: 25772 - protein, 16 aa, Severe acute respiratory syndrome coronavirus 2
  REGION 1..16: note = Table B: HLA-DRB1*07:01L
DGSEDNQTTTIQTIVE

SEQ ID NO: 25773 - protein, 14 aa, Severe acute respiratory syndrome coronavirus 2
  REGION 1..14: note = Table B: HLA-DRB1*07:01L
EVNSFSGYLKLTDN

SEQ ID NO: 25774 - protein, 14 aa, Severe acute respiratory syndrome coronavirus 2
  REGION 1..14: note = Table B: HLA-DRB1*07:01L
EGKTFYVLPNDDTL

SEQ ID NO: 25775 - protein, 15 aa, Severe acute respiratory syndrome coronavirus 2
  REGION 1..15: note = Table B: HLA-DRB1*07:01L
LGDVRETMSYLFQHA

SEQ ID NO: 25776 - protein, 16 aa, Severe acute respiratory syndrome coronavirus 2
  REGION 1..16: note = Table B: HLA-DRB1*07:01L HLA-DRB1*10:01L
FDNFKFVCDNIKFADD

SEQ ID NO: 25777 - protein, 16 aa, Severe acute respiratory syndrome coronavirus 2
  REGION 1..16: note = Table B: HLA-DRB1*07:01L
SIHLYFDKAGQKTYER

SEQ ID NO: 25778 - protein, 15 aa, Severe acute respiratory syndrome coronavirus 2
  REGION 1..15: note = Table B: HLA-DRB1*07:01L
TNDKACPLIAAVITR

SEQ ID NO: 25779 - protein, 16 aa, Severe acute respiratory syndrome coronavirus 2
  REGION 1..16: note = Table B: HLA-DRB1*07:01L
LKRRVVFNGVSFSTFE

SEQ ID NO: 25780 - protein, 12 aa, Severe acute respiratory syndrome coronavirus 2
  REGION 1..12: note = Table B: HLA-DRB1*07:01L
DYLVSTQEFRYM

SEQ ID NO: 25781 - protein, 17 aa, Severe acute respiratory syndrome coronavirus 2
  REGION 1..17: note = Table B: HLA-DRB1*07:01L
ISRQRLTKYTMADLVYA

SEQ ID NO: 25782 - protein, 12 aa, Severe acute respiratory syndrome coronavirus 2
  REGION 1..12: note = Table B: HLA-DRB1*07:01L
LRVYANLGERVR

SEQ ID NO: 25783 - protein, 14 aa, Severe acute respiratory syndrome coronavirus 2
  REGION 1..14: note = Table B: HLA-DRB1*07:01L
RFYRLANECAQVLS

SEQ ID NO: 25784 - protein, 16 aa, Severe acute respiratory syndrome coronavirus 2
  REGION 1..16: note = Table B: HLA-DRB1*07:01L
NGQVFGLYKNTCVGSD

SEQ ID NO: 25785 - protein, 14 aa, Severe acute respiratory syndrome coronavirus 2
  REGION 1..14: note = Table B: HLA-DRB1*07:01L
NRNYVFTGYRVTKN

SEQ ID NO: 25786 - protein, 14 aa, Severe acute respiratory syndrome coronavirus 2
  REGION 1..14: note = Table B: HLA-DRB1*07:01L
YGDAVVYRGTTTYK

SEQ ID NO: 25787 - protein, 11 aa, Severe acute respiratory syndrome coronavirus 2
  REGION 1..11: note = Table B: HLA-DRB1*07:01L
TTYKLNVGDYF

SEQ ID NO: 25788 - protein, 14 aa, Severe acute respiratory syndrome coronavirus 2
  REGION 1..14: note = Table B: HLA-DRB1*07:01L
VREFLTRNPAWRKA

SEQ ID NO: 25789 - protein, 14 aa, Severe acute respiratory syndrome coronavirus 2
  REGION 1..14: note = Table B: HLA-DRB1*07:01L HLA-DRB1*04:08L
TREAVGTNLPLQLG

SEQ ID NO: 25790 - protein, 14 aa, Severe acute respiratory syndrome coronavirus 2
  REGION 1..14: note = Table B: HLA-DRB1*07:01L
FDYVYNPFMIDVQQ

SEQ ID NO: 25791 - protein, 14 aa, Severe acute respiratory syndrome coronavirus 2
  REGION 1..14: note = Table B: HLA-DRB1*07:01L HLA-DRB1*10:01L
LWVYKQFDTYNLWN

SEQ ID NO: 25792 - protein, 16 aa, Severe acute respiratory syndrome coronavirus 2
  REGION 1..16: note = Table B: HLA-DRB1*07:01L
DEFIERYKLEGYAFEH

SEQ ID NO: 25793 - protein, 16 aa, Severe acute respiratory syndrome coronavirus 2
  REGION 1..16: note = Table B: HLA-DRB1*07:01L
VPYNMRVIHFGAGSDK

SEQ ID NO: 25794 - protein, 12 aa, Severe acute respiratory syndrome coronavirus 2
  REGION 1..12: note = Table B: HLA-DRB1*07:01L
LALGGSVAIKIT

SEQ ID NO: 25795 - protein, 14 aa, Severe acute respiratory syndrome coronavirus 2
  REGION 1..14: note = Table B: HLA-DRB1*07:01L
SKGRLIIRENNRVV

SEQ ID NO: 25796 - protein, 17 aa, Severe acute respiratory syndrome coronavirus 2
  REGION 1..17: note = Table B: HLA-DRB1*07:01L
PPAYTNSFTRGVYYPDK

SEQ ID NO: 25797 - protein, 16 aa, Severe acute respiratory syndrome coronavirus 2
  REGION 1..16: note = Table B: HLA-DRB1*07:01L
LDSKTQSLLIVNNATN

SEQ ID NO: 25798 - protein, 14 aa, Severe acute respiratory syndrome coronavirus 2
  REGION 1..14: note = Table B: HLA-DRB1*07:01L
NDPFLGVYYHKNNK

SEQ ID NO: 25799 - protein, 14 aa, Severe acute respiratory syndrome coronavirus 2
  REGION 1..14: note = Table B: HLA-DRB1*07:01L
ALHRSYLTPGDSSS

SEQ ID NO: 25800 - protein, 15 aa, Severe acute respiratory syndrome coronavirus 2
  REGION 1..15: note = Table B: HLA-DRB1*07:01L
NRKRISNCVADYSVL

SEQ ID NO: 25801 - protein, 14 aa, Severe acute respiratory syndrome coronavirus 2
  REGION 1..14: note = Table B: HLA-DRB1*07:01L
QIAPGQTGKIADYN

SEQ ID NO: 25802 - protein, 15 aa, Severe acute respiratory syndrome coronavirus 2
  REGION 1..15: note = Table B: HLA-DRB1*07:01L
DEMIAQYTSALLAGT

SEQ ID NO: 25803 - protein, 14 aa, Severe acute respiratory syndrome coronavirus 2
  REGION 1..14: note = Table B: HLA-DRB1*07:01L
EIDRLNEVAKNLNE

SEQ ID NO: 25804 - protein, 17 aa, Severe acute respiratory syndrome coronavirus 2
  REGION 1..17: note = Table B: HLA-DRB1*07:01L
VTSSIVITSGDGTTSPI

SEQ ID NO: 25805 - protein, 15 aa, Severe acute respiratory syndrome coronavirus 2
  REGION 1..15: note = Table B: HLA-DRB1*07:01L
NLDYIINLIIKNLSK

SEQ ID NO: 25806 - protein, 15 aa, Severe acute respiratory syndrome coronavirus 2
  REGION 1..15: note = Table B: HLA-DRB1*07:01L
IGTRNPANNAAIVLQ

SEQ ID NO: 25807 - protein, 14 aa, Severe acute respiratory syndrome coronavirus 2
  REGION 1..14: note = Table B: HLA-DRB1*07:01L
TATKAYNVTQAFGR

SEQ ID NO: 25808 - protein, 17 aa, Severe acute respiratory syndrome coronavirus 2
  REGION 1..17: note = Table B: HLA-DRB1*07:01L
DKKKKADETQALPQRQK

SEQ ID NO: 25809 - protein, 12 aa, Severe acute respiratory syndrome coronavirus 2
  REGION 1..12: note = Table B: HLA-DRB1*10:01L HLA-DRB1*15:03L
GYKAIDGGVTRD

SEQ ID NO: 25810 - protein, 15 aa, Severe acute respiratory syndrome coronavirus 2
  REGION 1..15: note = Table B: HLA-DRB1*10:01L
LPRVFSAVGNICYTP

SEQ ID NO: 25811 - protein, 14 aa, Severe acute respiratory syndrome coronavirus 2
  REGION 1..14: note = Table B: HLA-DRB1*10:01L HLA-DRB1*15:01L
MSAFAMMFVKHKHA

SEQ ID NO: 25812 - protein, 12 aa, Severe acute respiratory syndrome coronavirus 2
  REGION 1..12: note = Table B: HLA-DRB1*10:01L
DGTLMIERFVSL

SEQ ID NO: 25813 - protein, 15 aa, Severe acute respiratory syndrome coronavirus 2
  REGION 1..15: note = Table B: HLA-DRB1*10:01L
KGDYGDAVVYRGTTT

SEQ ID NO: 25814 - protein, 16 aa, Severe acute respiratory syndrome coronavirus 2
  REGION 1..16: note = Table B: HLA-DRB1*10:01L
KAALLADKFPVLHDIG

SEQ ID NO: 25815 - protein, 14 aa, Severe acute respiratory syndrome coronavirus 2
  REGION 1..14: note = Table B: HLA-DRB1*10:01L
FAWWTAFVTNVNAS

SEQ ID NO: 25816 - protein, 17 aa, Severe acute respiratory syndrome coronavirus 2
  REGION 1..17: note = Table B: HLA-DRB1*10:01L HLA-DRB1*08:02L
SNKKFLPFQQFGRDIAD

SEQ ID NO: 25817 - protein, 13 aa, Severe acute respiratory syndrome coronavirus 2
  REGION 1..13: note = Table B: HLA-DRB1*10:01L HLA-DRB1*08:03L
FLEYHDVRVVLDF

SEQ ID NO: 25818 - protein, 14 aa, Severe acute respiratory syndrome coronavirus 2
  REGION 1..14: note = Table B: HLA-DRB1*10:01L
AIVLQLPQGTTLPK

SEQ ID NO: 25819 - protein, 16 aa, Severe acute respiratory syndrome coronavirus 2
  REGION 1..16: note = Table B: HLA-DRB1*10:01L
DAALALLLLDRLNQLE

SEQ ID NO: 25820 - protein, 11 aa, Severe acute respiratory syndrome coronavirus 2
  REGION 1..11: note = Table B: HLA-DRB1*16:01L HLA-DQA1*02:01-B1*03:03L
EIAWYTERSEK

SEQ ID NO: 25821 - protein, 14 aa, Severe acute respiratory syndrome coronavirus 2
  REGION 1..14: note = Table B: HLA-DRB1*16:01L HLA-DRB1*15:03L
IKTIQPRVEKKKLD

SEQ ID NO: 25822 - protein, 11 aa, Severe acute respiratory syndrome coronavirus 2
  REGION 1..11: note = Table B: HLA-DRB1*16:01L
KKLDGFMGRIR

SEQ ID NO: 25823 - protein, 12 aa, Severe acute respiratory syndrome coronavirus 2
  REGION 1..12: note = Table B: HLA-DRB1*16:01L HLA-DRB1*15:03L
SLAEYHNESGLK

SEQ ID NO: 25824 - protein, 13 aa, Severe acute respiratory syndrome coronavirus 2
  REGION 1..13: note = Table B: HLA-DRB1*16:01L HLA-DQA1*01:03-B1*06:01L
VGEGSEGLNDNLL

SEQ ID NO: 25825 - protein, 14 aa, Severe acute respiratory syndrome coronavirus 2
  REGION 1..14: note = Table B: HLA-DRB1*16:01L HLA-DRB1*04:08L HLA-DRB1*15:03L
IVESCGNFKVTKGK

SEQ ID NO: 25826 - protein, 15 aa, Severe acute respiratory syndrome coronavirus 2
  REGION 1..15: note = Table B: HLA-DRB1*16:01L
DEEEGDCEEEEFEPS

SEQ ID NO: 25827 - protein, 14 aa, Severe acute respiratory syndrome coronavirus 2
  REGION 1..14: note = Table B: HLA-DRB1*16:01L
EPSTQYEYGTEDDY

SEQ ID NO: 25828 - protein, 12 aa, Severe acute respiratory syndrome coronavirus 2
  REGION 1..12: note = Table B: HLA-DRB1*16:01L
TSAALQPEEEQE

SEQ ID NO: 25829 - protein, 12 aa, Severe acute respiratory syndrome coronavirus 2
  REGION 1..12: note = Table B: HLA-DRB1*16:01L
LQPEEEQEEDWL

SEQ ID NO: 25830 - protein, 14 aa, Severe acute respiratory syndrome coronavirus 2
  REGION 1..14: note = Table B: HLA-DRB1*16:01L
QPEEEQEEDWLDDD

SEQ ID NO: 25831 - protein, 14 aa, Severe acute respiratory syndrome coronavirus 2
  REGION 1..14: note = Table B: HLA-DRB1*16:01L
EQEEDWLDDDSQQT

SEQ ID NO: 25832 - protein, 13 aa, Severe acute respiratory syndrome coronavirus 2
  REGION 1..13: note = Table B: HLA-DRB1*16:01L
TRKLMPVCVETKA

SEQ ID NO: 25833 - protein, 12 aa, Severe acute respiratory syndrome coronavirus 2
  REGION 1..12: note = Table B: HLA-DRB1*16:01L HLA-DQA1*01:03-B1*06:01L HLA-DQA1*02:01-B1*03:03L
YNGYLTSSSKTP

SEQ ID NO: 25834 - protein, 12 aa, Severe acute respiratory syndrome coronavirus 2
  REGION 1..12: note = Table B: HLA-DRB1*16:01L
TPEEHFIETISL

SEQ ID NO: 25835 - protein, 10 aa, Severe acute respiratory syndrome coronavirus 2
  REGION 1..10: note = Table B: HLA-DRB1*16:01L HLA-DQA1*02:01-B1*03:03L
SLREVRTIKV

SEQ ID NO: 25836 - protein, 14 aa, Severe acute respiratory syndrome coronavirus 2
  REGION 1..14: note = Table B: HLA-DRB1*16:01L HLA-DRB1*04:08L HLA-DRB1*15:03L
PSFLGRYMSALNHT

SEQ ID NO: 25837 - protein, 12 aa, Severe acute respiratory syndrome coronavirus 2
  REGION 1..12: note = Table B: HLA-DRB1*16:01L HLA-DRB1*04:08L
YQCGHYKHITSK

SEQ ID NO: 25838 - protein, 14 aa, Severe acute respiratory syndrome coronavirus 2
  REGION 1..14: note = Table B: HLA-DRB1*16:01L
SKETLYCIDGALLT

SEQ ID NO: 25839 - protein, 12 aa, Severe acute respiratory syndrome coronavirus 2
  REGION 1..12: note = Table B: HLA-DRB1*16:01L HLA-DQA1*01:03-B1*06:01L HLA-DQA1*02:01-B1*03:03L
KDNSYFTEQPID

SEQ ID NO: 25840 - protein, 12 aa, Severe acute respiratory syndrome coronavirus 2
  REGION 1..12: note = Table B: HLA-DRB1*16:01L HLA-DRB1*15:03L
LKVTFFPDLNGD

SEQ ID NO: 25841 - protein, 12 aa, Severe acute respiratory syndrome coronavirus 2
  REGION 1..12: note = Table B: HLA-DRB1*16:01L
DLNGDVVAIDYK

SEQ ID NO: 25842 - protein, 15 aa, Severe acute respiratory syndrome coronavirus 2
  REGION 1..15: note = Table B: HLA-DRB1*16:01L
FKKGAKLLHKPIVWH

SEQ ID NO: 25843 - protein, 10 aa, Severe acute respiratory syndrome coronavirus 2
  REGION 1..10: note = Table B: HLA-DRB1*16:01L
KTLATHGLAA

SEQ ID NO: 25844 - protein, 16 aa, Severe acute respiratory syndrome coronavirus 2
  REGION 1..16: note = Table B: HLA-DRB1*16:01L
TLLLQLCTFTRSTNSR

SEQ ID NO: 25845 - protein, 12 aa, Severe acute respiratory syndrome coronavirus 2
  REGION 1..12: note = Table B: HLA-DRB1*16:01L HLA-DRB1*04:08L
YILFTRFFYVLG

SEQ ID NO: 25846 - protein, 12 aa, Severe acute respiratory syndrome coronavirus 2
  REGION 1..12: note = Table B: HLA-DRB1*16:01L HLA-DRB1*15:03L
GSIHLYFDKAGQ

SEQ ID NO: 25847 - protein, 12 aa, Severe acute respiratory syndrome coronavirus 2
  REGION 1..12: note = Table B: HLA-DRB1*16:01L HLA-DRB1*04:08L
LAYYFMRFRRAF

SEQ ID NO: 25848 - protein, 13 aa, Severe acute respiratory syndrome coronavirus 2
  REGION 1..13: note = Table B: HLA-DRB1*16:01L
DVSFLAHIQWMVM

SEQ ID NO: 25849 - protein, 11 aa, Severe acute respiratory syndrome coronavirus 2
  REGION 1..11: note = Table B: HLA-DRB1*16:01L HLA-DRB1*15:03L
HFYWFFSNYLK

SEQ ID NO: 25850 - protein, 11 aa, Severe acute respiratory syndrome coronavirus 2
  REGION 1..11: note = Table B: HLA-DRB1*16:01L HLA-DQA1*01:03-B1*06:01L
LNPNYEDLLIR

SEQ ID NO: 25851 - protein, 10 aa, Severe acute respiratory syndrome coronavirus 2
  REGION 1..10: note = Table B: HLA-DRB1*16:01L HLA-DQA1*01:03-B1*06:01L HLA-DQA1*02:01-B1*03:03L HLA-DRB1*15:03L
VYKVYYGNAL

SEQ ID NO: 25852 - protein, 11 aa, Severe acute respiratory syndrome coronavirus 2
  REGION 1..11: note = Table B: HLA-DRB1*16:01L
LLAKDTTEAFE

SEQ ID NO: 25853 - protein, 13 aa, Severe acute respiratory syndrome coronavirus 2
  REGION 1..13: note = Table B: HLA-DRB1*16:01L
AKDTTEAFEKMVS

SEQ ID NO: 25854 - protein, 13 aa, Severe acute respiratory syndrome coronavirus 2
  REGION 1..13: note = Table B: HLA-DRB1*16:01L
ATAQEAYEQAVAN

SEQ ID NO: 25855 - protein, 11 aa, Severe acute respiratory syndrome coronavirus 2
  REGION 1..11: note = Table B: HLA-DRB1*16:01L
RKLEKMADQAM

SEQ ID NO: 25856 - protein, 12 aa, Severe acute respiratory syndrome coronavirus 2
  REGION 1..12: note = Table B: HLA-DRB1*16:01L
QTMLFTMLRKLD

SEQ ID NO: 25857 - protein, 12 aa, Severe acute respiratory syndrome coronavirus 2
  REGION 1..12: note = Table B: HLA-DRB1*16:01L HLA-DQA1*01:03-B1*06:01L HLA-DRB1*15:03L
NALAYYNTTKGG

SEQ ID NO: 25858 - protein, 11 aa, Severe acute respiratory syndrome coronavirus 2
  REGION 1..11: note = Table B: HLA-DRB1*16:01L HLA-DQA1*01:03-B1*06:01L
NLIDSYFVVKR

SEQ ID NO: 25859 - protein, 13 aa, Severe acute respiratory syndrome coronavirus 2
  REGION 1..13: note = Table B: HLA-DRB1*16:01L
QALLKTVQFCDAM

SEQ ID NO: 25860 - protein, 13 aa, Severe acute respiratory syndrome coronavirus 2
  REGION 1..13: note = Table B: HLA-DRB1*16:01L
NGNWYDFGDFIQT

SEQ ID NO: 25861 - protein, 13 aa, Severe acute respiratory syndrome coronavirus 2
  REGION 1..13: note = Table B: HLA-DRB1*16:01L HLA-DRB1*04:08L HLA-DRB1*15:03L
LKLFDRYFKYWDQ

SEQ ID NO: 25862 - protein, 12 aa, Severe acute respiratory syndrome coronavirus 2
  REGION 1..12: note = Table B: HLA-DRB1*16:01L
HFFFAQDGNAAI

SEQ ID NO: 25863 - protein, 11 aa, Severe acute respiratory syndrome coronavirus 2
  REGION 1..11: note = Table B: HLA-DRB1*16:01L HLA-DQA1*01:03-B1*06:01L
DSMSYEDQDAL

SEQ ID NO: 25864 - protein, 14 aa, Severe acute respiratory syndrome coronavirus 2
  REGION 1..14: note = Table B: HLA-DRB1*16:01L HLA-DRB1*04:08L
RNLQHRLYECLYRN

SEQ ID NO: 25865 - protein, 12 aa, Severe acute respiratory syndrome coronavirus 2
  REGION 1..12: note = Table B: HLA-DRB1*16:01L
LQYIRKLHDELT

SEQ ID NO: 25866 - protein, 14 aa, Severe acute respiratory syndrome coronavirus 2
  REGION 1..14: note = Table B: HLA-DRB1*16:01L
DVTDVTQLYLGGMS

SEQ ID NO: 25867 - protein, 10 aa, Severe acute respiratory syndrome coronavirus 2
  REGION 1..10: note = Table B: HLA-DRB1*16:01L
GYRVTKNSKV

SEQ ID NO: 25868 - protein, 12 aa, Severe acute respiratory syndrome coronavirus 2
  REGION 1..12: note = Table B: HLA-DRB1*16:01L
ARIVYTACSHAA

SEQ ID NO: 25869 - protein, 12 aa, Severe acute respiratory syndrome coronavirus 2
  REGION 1..12: note = Table B: HLA-DRB1*16:01L
VECFDKFKVNST

SEQ ID NO: 25870 - protein, 10 aa, Severe acute respiratory syndrome coronavirus 2
  REGION 1..10: note = Table B: HLA-DRB1*16:01L HLA-DQA1*02:01-B1*03:03L
MFYKGVITHD

SEQ ID NO: 25871 - protein, 11 aa, Severe acute respiratory syndrome coronavirus 2
  REGION 1..11: note = Table B: HLA-DRB1*16:01L
EFLTRNPAWRK

SEQ ID NO: 25872 - protein, 10 aa, Severe acute respiratory syndrome coronavirus 2
  REGION 1..10: note = Table B: HLA-DRB1*16:01L
ITREEAIRHV

SEQ ID NO: 25873 - protein, 10 aa, Severe acute respiratory syndrome coronavirus 2
  REGION 1..10: note = Table B: HLA-DRB1*16:01L HLA-DQA1*01:03-B1*06:01L HLA-DQA1*02:01-B1*03:03L HLA-DRB1*15:03L
WHHSIGFDYV

SEQ ID NO: 25874 - protein, 10 aa, Severe acute respiratory syndrome coronavirus 2
  REGION 1..10: note = Table B: HLA-DRB1*16:01L
THSDKFTDGV

SEQ ID NO: 25875 - protein, 13 aa, Severe acute respiratory syndrome coronavirus 2
  REGION 1..13: note = Table B: HLA-DRB1*16:01L HLA-DRB1*04:08L
PFFYYSDSPCESH

SEQ ID NO: 25876 - protein, 10 aa, Severe acute respiratory syndrome coronavirus 2
  REGION 1..10: note = Table B: HLA-DRB1*16:01L
DYKRDAPAHI

SEQ ID NO: 25877 - protein, 15 aa, Severe acute respiratory syndrome coronavirus 2
  REGION 1..15: note = Table B: HLA-DRB1*16:01L HLA-DRB1*04:08L
DGRVDGQVDLFRNAR

SEQ ID NO: 25878 - protein, 11 aa, Severe acute respiratory syndrome coronavirus 2
  REGION 1..11: note = Table B: HLA-DRB1*16:01L
RYKLEGYAFEH

SEQ ID NO: 25879 - protein, 13 aa, Severe acute respiratory syndrome coronavirus 2
  REGION 1..13: note = Table B: HLA-DRB1*16:01L
GLHLLIGLAKRFK

SEQ ID NO: 25880 - protein, 11 aa, Severe acute respiratory syndrome coronavirus 2
  REGION 1..11: note = Table B: HLA-DRB1*16:01L
KRFKESPFELE

SEQ ID NO: 25881 - protein, 11 aa, Severe acute respiratory syndrome coronavirus 2
  REGION 1..11: note = Table B: HLA-DRB1*16:01L
VIHFGAGSDKG

SEQ ID NO: 25882 - protein, 11 aa, Severe acute respiratory syndrome coronavirus 2
  REGION 1..11: note = Table B: HLA-DRB1*16:01L
KLRGTAVMSLK

SEQ ID NO: 25883 - protein, 12 aa, Severe acute respiratory syndrome coronavirus 2
  REGION 1..12: note = Table B: HLA-DRB1*16:01L
NFKNLREFVFKN

SEQ ID NO: 25884 - protein, 10 aa, Severe acute respiratory syndrome coronavirus 2
  REGION 1..10: note = Table B: HLA-DRB1*16:01L HLA-DRB1*15:03L
IYQTSNFRVQ

SEQ ID NO: 25885 - protein, 11 aa, Severe acute respiratory syndrome coronavirus 2
  REGION 1..11: note = Table B: HLA-DRB1*16:01L
SNFRVQPTESI

SEQ ID NO: 25886 - protein, 11 aa, Severe acute respiratory syndrome coronavirus 2
  REGION 1..11: note = Table B: HLA-DRB1*16:01L HLA-DQA1*02:01-B1*03:03L HLA-DRB1*15:03L
KFLPFQQFGRD

SEQ ID NO: 25887 - protein, 10 aa, Severe acute respiratory syndrome coronavirus 2
  REGION 1..10: note = Table B: HLA-DRB1*16:01L
RARSVASQSI

SEQ ID NO: 25888 - protein, 12 aa, Severe acute respiratory syndrome coronavirus 2
  REGION 1..12: note = Table B: HLA-DRB1*16:01L HLA-DRB1*15:03L
QVKQIYKTPPIK

SEQ ID NO: 25889 - protein, 12 aa, Severe acute respiratory syndrome coronavirus 2
  REGION 1..12: note = Table B: HLA-DRB1*16:01L
EMIAQYTSALLA

SEQ ID NO: 25890 - protein, 16 aa, Severe acute respiratory syndrome coronavirus 2
  REGION 1..16: note = Table B: HLA-DRB1*16:01L
ATKMSECVLGQSKRVD

SEQ ID NO: 25891 - protein, 12 aa, Severe acute respiratory syndrome coronavirus 2
  REGION 1..12: note = Table B: HLA-DRB1*16:01L HLA-DRB1*04:08L
FLHVTYVPAQEK

SEQ ID NO: 25892 - protein, 10 aa, Severe acute respiratory syndrome coronavirus 2
  REGION 1..10: note = Table B: HLA-DRB1*16:01L HLA-DQA1*02:01-B1*03:03L
AVFQSASKII

SEQ ID NO: 25893 - protein, 14 aa, Severe acute respiratory syndrome coronavirus 2
  REGION 1..14: note = Table B: HLA-DRB1*16:01L HLA-DRB1*04:08L HLA-DRB1*15:03L
ITLKKRWQLALSKG

SEQ ID NO: 25894 - protein, 11 aa, Severe acute respiratory syndrome coronavirus 2
  REGION 1..11: note = Table B: HLA-DRB1*16:01L
VLHSYFTSDYY

SEQ ID NO: 25895 - protein, 11 aa, Severe acute respiratory syndrome coronavirus 2
  REGION 1..11: note = Table B: HLA-DRB1*16:01L HLA-DRB1*04:08L
DGSSGVVNPVM

SEQ ID NO: 25896 - protein, 15 aa, Severe acute respiratory syndrome coronavirus 2
  REGION 1..15: note = Table B: HLA-DRB1*16:01L HLA-DRB1*04:08L
GHHLGRCDIKDLPKE

SEQ ID NO: 25897 - protein, 10 aa, Severe acute respiratory syndrome coronavirus 2
  REGION 1..10: note = Table B: HLA-DRB1*16:01L HLA-DQA1*01:03-B1*06:01L HLA-DQA1*02:01-B1*03:03L
YYKLGASQRV

SEQ ID NO: 25898 - protein, 15 aa, Severe acute respiratory syndrome coronavirus 2
  REGION 1..15: note = Table B: HLA-DRB1*16:01L
NKFALTCFSTQFAFA

SEQ ID NO: 25899 - protein, 11 aa, Severe acute respiratory syndrome coronavirus 2
  REGION 1..11: note = Table B: HLA-DRB1*16:01L
PIHFYSKWYIR

SEQ ID NO: 25900 - protein, 15 aa, Severe acute respiratory syndrome coronavirus 2
  REGION 1..15: note = Table B: HLA-DRB1*16:01L
KEDLKFPRGQGVPIN

SEQ ID NO: 25901 - protein, 11 aa, Severe acute respiratory syndrome coronavirus 2
  REGION 1..11: note = Table B: HLA-DRB1*16:01L HLA-DQA1*02:01-B1*03:03L
FPRGQGVPINT

SEQ ID NO: 25902 - protein, 15 aa, Severe acute respiratory syndrome coronavirus 2
  REGION 1..15: note = Table B: HLA-DRB1*16:01L
RIRGGDGKMKDLSPR

SEQ ID NO: 25903 - protein, 15 aa, Severe acute respiratory syndrome coronavirus 2
  REGION 1..15: note = Table B: HLA-DRB1*16:01L
AEGSRGGSQASSRSS

SEQ ID NO: 25904 - protein, 12 aa, Severe acute respiratory syndrome coronavirus 2
  REGION 1..12: note = Table B: HLA-DRB1*16:01L HLA-DRB1*15:03L
KHIDAYKTFPPT

SEQ ID NO: 25905 - protein, 11 aa, Severe acute respiratory syndrome coronavirus 2
  REGION 1..11: note = Table B: HLA-DQA1*01:03-B1*06:01L
VQLSLPVLQVR

SEQ ID NO: 25906 - protein, 10 aa, Severe acute respiratory syndrome coronavirus 2
  REGION 1..10: note = Table B: HLA-DQA1*01:03-B1*06:01L
GTCGLVEVEK

SEQ ID NO: 25907 - protein, 11 aa, Severe acute respiratory syndrome coronavirus 2
  REGION 1..11: note = Table B: HLA-DQA1*01:03-B1*06:01L
EVEKGVLPQLE

SEQ ID NO: 25908 - protein, 14 aa, Severe acute respiratory syndrome coronavirus 2
  REGION 1..14: note = Table B: HLA-DQA1*01:03-B1*06:01L
TAPHGHVMVELVAE

SEQ ID NO: 25909 - protein, 11 aa, Severe acute respiratory syndrome coronavirus 2
  REGION 1..11: note = Table B: HLA-DQA1*01:03-B1*06:01L HLA-DQA1*02:01-B1*03:03L
ELEGIQYGRSG

SEQ ID NO: 25910 - protein, 12 aa, Severe acute respiratory syndrome coronavirus 2
  REGION 1..12: note = Table B: HLA-DQA1*01:03-B1*06:01L
RSGETLGVLVPH

SEQ ID NO: 25911 - protein, 10 aa, Severe acute respiratory syndrome coronavirus 2
  REGION 1..10: note = Table B: HLA-DQA1*01:03-B1*06:01L
TLGVLVPHVG

SEQ ID NO: 25912 - protein, 11 aa, Severe acute respiratory syndrome coronavirus 2
  REGION 1..11: note = Table B: HLA-DQA1*01:03-B1*06:01L
PHVGEIPVAYR

SEQ ID NO: 25913 - protein, 15 aa, Severe acute respiratory syndrome coronavirus 2
  REGION 1..15: note = Table B: HLA-DQA1*01:03-B1*06:01L
DLKSFDLGDELGTDP

SEQ ID NO: 25914 - protein, 15 aa, Severe acute respiratory syndrome coronavirus 2
  REGION 1..15: note = Table B: HLA-DQA1*01:03-B1*06:01L
SFDLGDELGTDPYED

SEQ ID NO: 25915 - protein, 10 aa, Severe acute respiratory syndrome coronavirus 2
  REGION 1..10: note = Table B: HLA-DQA1*01:03-B1*06:01L
SSGVTRELMR

SEQ ID NO: 25916 - protein, 15 aa, Severe acute respiratory syndrome coronavirus 2
  REGION 1..15: note = Table B: HLA-DQA1*01:03-B1*06:01L
YPLECIKDLLARAGK

SEQ ID NO: 25917 - protein, 12 aa, Severe acute respiratory syndrome coronavirus 2
  REGION 1..12: note = Table B: HLA-DQA1*01:03-B1*06:01L
QTGDFVKATCEF

SEQ ID NO: 25918 - protein, 11 aa, Severe acute respiratory syndrome coronavirus 2
  REGION 1..11: note = Table B: HLA-DQA1*01:03-B1*06:01L
FCGTENLTKEG

SEQ ID NO: 25919 - protein, 10 aa, Severe acute respiratory syndrome coronavirus 2
  REGION 1..10: note = Table B: HLA-DQA1*01:03-B1*06:01L
ATTCGYLPQN

SEQ ID NO: 25920 - protein, 10 aa, Severe acute respiratory syndrome coronavirus 2
  REGION 1..10: note = Table B: HLA-DQA1*01:03-B1*06:01L HLA-DQA1*02:01-B1*03:03L
NHTGVVGEGS

SEQ ID NO: 25921 - protein, 10 aa, Severe acute respiratory syndrome coronavirus 2
  REGION 1..10: note = Table B: HLA-DQA1*01:03-B1*06:01L HLA-DQA1*02:01-B1*03:03L
HTGVVGEGSE

SEQ ID NO: 25922 - protein, 12 aa, Severe acute respiratory syndrome coronavirus 2
  REGION 1..12: note = Table B: HLA-DQA1*01:03-B1*06:01L HLA-DQA1*02:01-B1*03:03L
TGVVGEGSEGLN

SEQ ID NO: 25923 - protein, 13 aa, Severe acute respiratory syndrome coronavirus 2
  REGION 1..13: note = Table B: HLA-DQA1*01:03-B1*06:01L
LNEEIAIILASFS

SEQ ID NO: 25924 - protein, 12 aa, Severe acute respiratory syndrome coronavirus 2
  REGION 1..12: note = Table B: HLA-DQA1*01:03-B1*06:01L
FSASTSAFVETV

SEQ ID NO: 25925 - protein, 15 aa, Severe acute respiratory syndrome coronavirus 2
  REGION 1..15: note = Table B: HLA-DQA1*01:03-B1*06:01L
GKAKKGAWNIGEQKS

SEQ ID NO: 25926 - protein, 10 aa, Severe acute respiratory syndrome coronavirus 2
  REGION 1..10: note = Table B: HLA-DQA1*01:03-B1*06:01L
YITGGVVQLT

SEQ ID NO: 25927 - protein, 10 aa, Severe acute respiratory syndrome coronavirus 2
  REGION 1..10: note = Table B: HLA-DQA1*01:03-B1*06:01L
ITGGVVQLTS

SEQ ID NO: 25928 - protein, 10 aa, Severe acute respiratory syndrome coronavirus 2
  REGION 1..10: note = Table B: HLA-DQA1*01:03-B1*06:01L
TGGVVQLTSQ

SEQ ID NO: 25929 - protein, 10 aa, Severe acute respiratory syndrome coronavirus 2
  REGION 1..10: note = Table B: HLA-DQA1*01:03-B1*06:01L
LTSQWLTNIF

SEQ ID NO: 25930 - protein, 11 aa, Severe acute respiratory syndrome coronavirus 2
  REGION 1..11: note = Table B: HLA-DQA1*01:03-B1*06:01L
QWLTNIFGTVY

SEQ ID NO: 25931 - protein, 10 aa, Severe acute respiratory syndrome coronavirus 2
  REGION 1..10: note = Table B: HLA-DQA1*01:03-B1*06:01L
IVGGQIVTCA

SEQ ID NO: 25932 - protein, 10 aa, Severe acute respiratory syndrome coronavirus 2
  REGION 1..10: note = Table B: HLA-DQA1*01:03-B1*06:01L
VGGQIVTCAK

SEQ ID NO: 25933 - protein, 10 aa, Severe acute respiratory syndrome coronavirus 2
  REGION 1..10: note = Table B: HLA-DQA1*01:03-B1*06:01L HLA-DQA1*02:01-B1*03:03L
IIGGAKLKAL

SEQ ID NO: 25934 - protein, 10 aa, Severe acute respiratory syndrome coronavirus 2
  REGION 1..10: note = Table B: HLA-DQA1*01:03-B1*06:01L
ETGLLMPLKA

SEQ ID NO: 25935 - protein, 10 aa, Severe acute respiratory syndrome coronavirus 2
  REGION 1..10: note = Table B: HLA-DQA1*01:03-B1*06:01L
TGLLMPLKAP

SEQ ID NO: 25936 - protein, 10 aa, Severe acute respiratory syndrome coronavirus 2
  REGION 1..10: note = Table B: HLA-DQA1*01:03-B1*06:01L
LMPLKAPKEI

SEQ ID NO: 25937 - protein, 12 aa, Severe acute respiratory syndrome coronavirus 2
  REGION 1..12: note = Table B: HLA-DQA1*01:03-B1*06:01L
LEGETLPTEVLT

SEQ ID NO: 25938 - protein, 10 aa, Severe acute respiratory syndrome coronavirus 2
  REGION 1..10: note = Table B: HLA-DQA1*01:03-B1*06:01L
VLKTGDLQPL

SEQ ID NO: 25939 - protein, 10 aa, Severe acute respiratory syndrome coronavirus 2
  REGION 1..10: note = Table B: HLA-DQA1*01:03-B1*06:01L
KTGDLQPLEQ

SEQ ID NO: 25940 - protein, 14 aa, Severe acute respiratory syndrome coronavirus 2
  REGION 1..14: note = Table B: HLA-DQA1*01:03-B1*06:01L HLA-DQA1*02:01-B1*03:03L
PLEQPTSEAVEAPL

SEQ ID NO: 25941 - protein, 12 aa, Severe acute respiratory syndrome coronavirus 2
  REGION 1..12: note = Table B: HLA-DQA1*01:03-B1*06:01L
ADAVIKTLQPVS

SEQ ID NO: 25942 - protein, 18 aa, Severe acute respiratory syndrome coronavirus 2
  REGION 1..18: note = Table B: HLA-DQA1*01:03-B1*06:01L
YPPDEDEEEGDCEEEEFE

SEQ ID NO: 25943 - protein, 10 aa, Severe acute respiratory syndrome coronavirus 2
  REGION 1..10: note = Table B: HLA-DQA1*01:03-B1*06:01L
ATSAALQPEE

SEQ ID NO: 25944 - protein, 16 aa, Severe acute respiratory syndrome coronavirus 2
  REGION 1..16: note = Table B: HLA-DQA1*01:03-B1*06:01L
QPEEEQEEDWLDDDSQ

SEQ ID NO: 25945 - protein, 13 aa, Severe acute respiratory syndrome coronavirus 2
  REGION 1..13: note = Table B: HLA-DQA1*01:03-B1*06:01L HLA-DQA1*02:01-B1*03:03L
SQQTVGQQDGSED

SEQ ID NO: 25946 - protein, 10 aa, Severe acute respiratory syndrome coronavirus 2
  REGION 1..10: note = Table B: HLA-DQA1*01:03-B1*06:01L
NQTTTIQTIV

SEQ ID NO: 25947 - protein, 11 aa, Severe acute respiratory syndrome coronavirus 2
  REGION 1..11: note = Table B: HLA-DQA1*01:03-B1*06:01L
VQTIEVNSFSG

SEQ ID NO: 25948 - protein, 11 aa, Severe acute respiratory syndrome coronavirus 2
  REGION 1..11: note = Table B: HLA-DQA1*01:03-B1*06:01L HLA-DQA1*02:01-B1*03:03L
VNAANVYLKHG

SEQ ID NO: 25949 - protein, 10 aa, Severe acute respiratory syndrome coronavirus 2
  REGION 1..10: note = Table B: HLA-DQA1*01:03-B1*06:01L HLA-DQA1*02:01-B1*03:03L
AGALNKATNN

SEQ ID NO: 25950 - protein, 11 aa, Severe acute respiratory syndrome coronavirus 2
  REGION 1..11: note = Table B: HLA-DQA1*01:03-B1*06:01L
ATNGPLKVGGS

SEQ ID NO: 25951 - protein, 10 aa, Severe acute respiratory syndrome coronavirus 2
  REGION 1..10: note = Table B: HLA-DQA1*01:03-B1*06:01L
GGSCVLSGHN

SEQ ID NO: 25952 - protein, 12 aa, Severe acute respiratory syndrome coronavirus 2
  REGION 1..12: note = Table B: HLA-DQA1*01:03-B1*06:01L
PNVNKGEDIQLL

SEQ ID NO: 25953 - protein, 10 aa, Severe acute respiratory syndrome coronavirus 2
  REGION 1..10: note = Table B: HLA-DQA1*01:03-B1*06:01L
NKGEDIQLLK

SEQ ID NO: 25954 - protein, 12 aa, Severe acute respiratory syndrome coronavirus 2
  REGION 1..12: note = Table B: HLA-DQA1*01:03-B1*06:01L
LLSAGIFGADPI

SEQ ID NO: 25955 - protein, 15 aa, Severe acute respiratory syndrome coronavirus 2
  REGION 1..15: note = Table B: HLA-DQA1*01:03-B1*06:01L
SEKQVEQKIAEIPKE

SEQ ID NO: 25956 - protein, 11 aa, Severe acute respiratory syndrome coronavirus 2
  REGION 1..11: note = Table B: HLA-DQA1*01:03-B1*06:01L
IKACVEEVTTT

SEQ ID NO: 25957 - protein, 10 aa, Severe acute respiratory syndrome coronavirus 2
  REGION 1..10: note = Table B: HLA-DQA1*01:03-B1*06:01L
TTTLEETKFL

SEQ ID NO: 25958 - protein, 11 aa, Severe acute respiratory syndrome coronavirus 2
  REGION 1..11: note = Table B: HLA-DQA1*01:03-B1*06:01L
PDSATLVSDID

SEQ ID NO: 25959 - protein, 10 aa, Severe acute respiratory syndrome coronavirus 2
  REGION 1..10: note = Table B: HLA-DQA1*01:03-B1*06:01L HLA-DQA1*02:01-B1*03:03L
TAVVIPTKKA

SEQ ID NO: 25960 - protein, 10 aa, Severe acute respiratory syndrome coronavirus 2
  REGION 1..10: note = Table B: HLA-DQA1*01:03-B1*06:01L
ETKAIVSTIQ

SEQ ID NO: 25961 - protein, 10 aa, Severe acute respiratory syndrome coronavirus 2
  REGION 1..10: note = Table B: HLA-DQA1*01:03-B1*06:01L
SKTTVASLIN

SEQ ID NO: 25962 - protein, 10 aa, Severe acute respiratory syndrome coronavirus 2
  REGION 1..10: note = Table B: HLA-DQA1*01:03-B1*06:01L
TVASLINTLN

SEQ ID NO: 25963 - protein, 12 aa, Severe acute respiratory syndrome coronavirus 2
  REGION 1..12: note = Table B: HLA-DQA1*01:03-B1*06:01L
NETLVTMPLGYV

SEQ ID NO: 25964 - protein, 11 aa, Severe acute respiratory syndrome coronavirus 2
  REGION 1..11: note = Table B: HLA-DQA1*01:03-B1*06:01L
VTHGLNLEEAA

SEQ ID NO: 25965 - protein, 12 aa, Severe acute respiratory syndrome coronavirus 2
  REGION 1..12: note = Table B: HLA-DQA1*01:03-B1*06:01L
SGQSTQLGIEFL

SEQ ID NO: 25966 - protein, 13 aa, Severe acute respiratory syndrome coronavirus 2
  REGION 1..13: note = Table B: HLA-DQA1*01:03-B1*06:01L
TSNPTTFHLDGEV

SEQ ID NO: 25967 - protein, 16 aa, Severe acute respiratory syndrome coronavirus 2
  REGION 1..16: note = Table B: HLA-DQA1*01:03-B1*06:01L
DNLKTLLSLREVRTIK

SEQ ID NO: 25968 - protein, 10 aa, Severe acute respiratory syndrome coronavirus 2
  REGION 1..10: note = Table B: HLA-DQA1*01:03-B1*06:01L
LDGADVTKIK

SEQ ID NO: 25969 - protein, 16 aa, Severe acute respiratory syndrome coronavirus 2
  REGION 1..16: note = Table B: HLA-DQA1*01:03-B1*06:01L
KPHNSHEGKTFYVLPN

SEQ ID NO: 25970 - protein, 11 aa, Severe acute respiratory syndrome coronavirus 2
  REGION 1..11: note = Table B: HLA-DQA1*01:03-B1*06:01L
ATALLTLQQIE

SEQ ID NO: 25971 - protein, 12 aa, Severe acute respiratory syndrome coronavirus 2
  REGION 1..12: note = Table B: HLA-DQA1*01:03-B1*06:01L
FNPPALQDAYYR

SEQ ID NO: 25972 - protein, 16 aa, Severe acute respiratory syndrome coronavirus 2
  REGION 1..16: note = Table B: HLA-DQA1*01:03-B1*06:01L
PPALQDAYYRARAGEA

SEQ ID NO: 25973 - protein, 12 aa, Severe acute respiratory syndrome coronavirus 2
  REGION 1..12: note = Table B: HLA-DQA1*01:03-B1*06:01L
ARAGEAANFCAL

SEQ ID NO: 25974 - protein, 10 aa, Severe acute respiratory syndrome coronavirus 2
  REGION 1..10: note = Table B: HLA-DQA1*01:03-B1*06:01L
ELGDVRETMS

SEQ ID NO: 25975 - protein, 13 aa, Severe acute respiratory syndrome coronavirus 2
  REGION 1..13: note = Table B: HLA-DQA1*01:03-B1*06:01L
GVQIPCTCGKQAT

SEQ ID NO: 25976 - protein, 13 aa, Severe acute respiratory syndrome coronavirus 2
  REGION 1..13: note = Table B: HLA-DQA1*01:03-B1*06:01L
VQIPCTCGKQATK

SEQ ID NO: 25977 - protein, 12 aa, Severe acute respiratory syndrome coronavirus 2
  REGION 1..12: note = Table B: HLA-DQA1*01:03-B1*06:01L
MMSAPPAQYELK

SEQ ID NO: 25978 - protein, 13 aa, Severe acute respiratory syndrome coronavirus 2
  REGION 1..13: note = Table B: HLA-DQA1*01:03-B1*06:01L
GTFTCASEYTGNY

SEQ ID NO: 25979 - protein, 11 aa, Severe acute respiratory syndrome coronavirus 2
  REGION 1..11: note = Table B: HLA-DQA1*01:03-B1*06:01L
VVCTEIDPKLD

SEQ ID NO: 25980 - protein, 14 aa, Severe acute respiratory syndrome coronavirus 2
  REGION 1..14: note = Table B: HLA-DQA1*01:03-B1*06:01L
IKFADDLNQLTGYK

SEQ ID NO: 25981 - protein, 11 aa, Severe acute respiratory syndrome coronavirus 2
  REGION 1..11: note = Table B: HLA-DQA1*01:03-B1*06:01L
TNKATYKPNTW

SEQ ID NO: 25982 - protein, 10 aa, Severe acute respiratory syndrome coronavirus 2
  REGION 1..10: note = Table B: HLA-DQA1*01:03-B1*06:01L HLA-DQA1*02:01-B1*03:03L
LWSTKPVETS

SEQ ID NO: 25983 - protein, 13 aa, Severe acute respiratory syndrome coronavirus 2
  REGION 1..13: note = Table B: HLA-DQA1*01:03-B1*06:01L HLA-DQA1*02:01-B1*03:03L
PVSEEVVENPTIQ

SEQ ID NO: 25984 - protein, 12 aa, Severe acute respiratory syndrome coronavirus 2
  REGION 1..12: note = Table B: HLA-DQA1*01:03-B1*06:01L
KDVLECNVKTTE

SEQ ID NO: 25985 - protein, 10 aa, Severe acute respiratory syndrome coronavirus 2
  REGION 1..10: note = Table B: HLA-DQA1*01:03-B1*06:01L
LATHGLAAVN

SEQ ID NO: 25986 - protein, 10 aa, Severe acute respiratory syndrome coronavirus 2
  REGION 1..10: note = Table B: HLA-DQA1*01:03-B1*06:01L
TTNIVTRCLN

SEQ ID NO: 25987 - protein, 10 aa, Severe acute respiratory syndrome coronavirus 2
  REGION 1..10: note = Table B: HLA-DQA1*01:03-B1*06:01L
YSTAALGVLM

SEQ ID NO: 25988 - protein, 11 aa, Severe acute respiratory syndrome coronavirus 2
  REGION 1..11: note = Table B: HLA-DQA1*01:03-B1*06:01L
STAALGVLMSN

SEQ ID NO: 25989 - protein, 13 aa, Severe acute respiratory syndrome coronavirus 2
  REGION 1..13: note = Table B: HLA-DQA1*01:03-B1*06:01L
GSIPCSVCLSGLD

SEQ ID NO: 25990 - protein, 15 aa, Severe acute respiratory syndrome coronavirus 2
  REGION 1..15: note = Table B: HLA-DQA1*01:03-B1*06:01L
VDGCNSSTCMMCYKR

SEQ ID NO: 25991 - protein, 10 aa, Severe acute respiratory syndrome coronavirus 2
  REGION 1..10: note = Table B: HLA-DQA1*01:03-B1*06:01L
TTIVNGVRRS

SEQ ID NO: 25992 - protein, 10 aa, Severe acute respiratory syndrome coronavirus 2
  REGION 1..10: note = Table B: HLA-DQA1*01:03-B1*06:01L
VKNGSIHLYF

SEQ ID NO: 25993 - protein, 10 aa, Severe acute respiratory syndrome coronavirus 2
  REGION 1..10: note = Table B: HLA-DQA1*01:03-B1*06:01L HLA-DQA1*02:01-B1*03:03L
NGSIHLYFDK

SEQ ID NO: 25994 - protein, 11 aa, Severe acute respiratory syndrome coronavirus 2
  REGION 1..11: note = Table B: HLA-DQA1*01:03-B1*06:01L
NTKGSLPINVI

SEQ ID NO: 25995 - protein, 14 aa, Severe acute respiratory syndrome coronavirus 2
  REGION 1..14: note = Table B: HLA-DQA1*01:03-B1*06:01L
IVFDGKSKCEESSA

SEQ ID NO: 25996 - protein, 10 aa, Severe acute respiratory syndrome coronavirus 2
  REGION 1..10: note = Table B: HLA-DQA1*01:03-B1*06:01L HLA-DQA1*02:01-B1*03:03L
AKSASVYYSQ

SEQ ID NO: 25997 - protein, 12 aa, Severe acute respiratory syndrome coronavirus 2
  REGION 1..12: note = Table B: HLA-DQA1*01:03-B1*06:01L
MFDAYVNTFSST

SEQ ID NO: 25998 - protein, 10 aa, Severe acute respiratory syndrome coronavirus 2
  REGION 1..10: note = Table B: HLA-DQA1*01:03-B1*06:01L
FNVPMEKLKT

SEQ ID NO: 25999 - protein, 11 aa, Severe acute respiratory syndrome coronavirus 2
  REGION 1..11: note = Table B: HLA-DQA1*01:03-B1*06:01L
GFVDSDVETKD

SEQ ID NO: 26000 - protein, 11 aa, Severe acute respiratory syndrome coronavirus 2
  REGION 1..11: note = Table B: HLA-DQA1*01:03-B1*06:01L
DSDVETKDVVE

SEQ ID NO: 26001 - protein, 11 aa, Severe acute respiratory syndrome coronavirus 2
  REGION 1..11: note = Table B: HLA-DQA1*01:03-B1*06:01L
SHNIALIWNVK

SEQ ID NO: 26002 - protein, 10 aa, Severe acute respiratory syndrome coronavirus 2
  REGION 1..10: note = Table B: HLA-DQA1*01:03-B1*06:01L
KGGKIVNNWL

SEQ ID NO: 26003 - protein, 10 aa, Severe acute respiratory syndrome coronavirus 2
  REGION 1..10: note = Table B: HLA-DQA1*01:03-B1*06:01L HLA-DQA1*02:01-B1*03:03L
FSSEIIGYKA

SEQ ID NO: 26004 - protein, 11 aa, Severe acute respiratory syndrome coronavirus 2
  REGION 1..11: note = Table B: HLA-DQA1*01:03-B1*06:01L
DIASTDTCFAN

SEQ ID NO: 26005 - protein, 11 aa, Severe acute respiratory syndrome coronavirus 2
  REGION 1..11: note = Table B: HLA-DQA1*01:03-B1*06:01L HLA-DQA1*02:01-B1*03:03L
IASTDTCFANK

SEQ ID NO: 26006 - protein, 10 aa, Severe acute respiratory syndrome coronavirus 2
  REGION 1..10: note = Table B: HLA-DQA1*01:03-B1*06:01L
LPGTILRTTN

SEQ ID NO: 26007 - protein, 10 aa, Severe acute respiratory syndrome coronavirus 2
  REGION 1..10: note = Table B: HLA-DQA1*01:03-B1*06:01L HLA-DQA1*02:01-B1*03:03L
TILRTTNGDF

SEQ ID NO: 26008 - protein, 11 aa, Severe acute respiratory syndrome coronavirus 2
  REGION 1..11: note = Table B: HLA-DQA1*01:03-B1*06:01L
YTPSKLIEYTD

SEQ ID NO: 26009 - protein, 10 aa, Severe acute respiratory syndrome coronavirus 2
  REGION 1..10: note = Table B: HLA-DQA1*01:03-B1*06:01L
DTNVLEGSVA

SEQ ID NO: 26010 - protein, 11 aa, Severe acute respiratory syndrome coronavirus 2
  REGION 1..11: note = Table B: HLA-DQA1*01:03-B1*06:01L
LMDGSIIQFPN

SEQ ID NO: 26011 - protein, 14 aa, Severe acute respiratory syndrome coronavirus 2
  REGION 1..14: note = Table B: HLA-DQA1*01:03-B1*06:01L
EYCRHGTCERSEAG

SEQ ID NO: 26012 - protein, 11 aa, Severe acute respiratory syndrome coronavirus 2
  REGION 1..11: note = Table B: HLA-DQA1*01:03-B1*06:01L
VSTSGRWVLNN

SEQ ID NO: 26013 - protein, 11 aa, Severe acute respiratory syndrome coronavirus 2
  REGION 1..11: note = Table B: HLA-DQA1*01:03-B1*06:01L
STSGRWVLNND

SEQ ID NO: 26014 - protein, 11 aa, Severe acute respiratory syndrome coronavirus 2
  REGION 1..11: note = Table B: HLA-DQA1*01:03-B1*06:01L
SGRWVLNNDYY

SEQ ID NO: 26015 - protein, 10 aa, Severe acute respiratory syndrome coronavirus 2
  REGION 1..10: note = Table B: HLA-DQA1*01:03-B1*06:01L
IVAGGIVAIV

SEQ ID NO: 26016 - protein, 11 aa, Severe acute respiratory syndrome coronavirus 2
  REGION 1..11: note = Table B: HLA-DQA1*01:03-B1*06:01L
FNGVSFSTFEE

SEQ ID NO: 26017 - protein, 11 aa, Severe acute respiratory syndrome coronavirus 2
  REGION 1..11: note = Table B: HLA-DQA1*01:03-B1*06:01L
EAACCHLAKAL

SEQ ID NO: 26018 - protein, 12 aa, Severe acute respiratory syndrome coronavirus 2
  REGION 1..12: note = Table B: HLA-DQA1*01:03-B1*06:01L
AACCHLAKALND

SEQ ID NO: 26019 - protein, 12 aa, Severe acute respiratory syndrome coronavirus 2
  REGION 1..12: note = Table B: HLA-DQA1*01:03-B1*06:01L
SNSGSDVLYQPP

SEQ ID NO: 26020 - protein, 10 aa, Severe acute respiratory syndrome coronavirus 2
  REGION 1..10: note = Table B: HLA-DQA1*01:03-B1*06:01L
SITSAVLQSG

SEQ ID NO: 26021 - protein, 11 aa, Severe acute respiratory syndrome coronavirus 2
  REGION 1..11: note = Table B: HLA-DQA1*01:03-B1*06:01L
VEGCMVQVTCG

SEQ ID NO: 26022 - protein, 12 aa, Severe acute respiratory syndrome coronavirus 2
  REGION 1..12: note = Table B: HLA-DQA1*01:03-B1*06:01L
TTTLNGLWLDDV

SEQ ID NO: 26023 - protein, 14 aa, Severe acute respiratory syndrome coronavirus 2
  REGION 1..14: note = Table B: HLA-DQA1*01:03-B1*06:01L
VICTSEDMLNPNYE

SEQ ID NO: 26024 - protein, 12 aa, Severe acute respiratory syndrome coronavirus 2
  REGION 1..12: note = Table B: HLA-DQA1*01:03-B1*06:01L
SEDMLNPNYEDL

SEQ ID NO: 26025 - protein, 15 aa, Severe acute respiratory syndrome coronavirus 2
  REGION 1..15: note = Table B: HLA-DQA1*01:03-B1*06:01L
GHSMQNCVLKLKVDT

SEQ ID NO: 26026 - protein, 11 aa, Severe acute respiratory syndrome coronavirus 2
  REGION 1..11: note = Table B: HLA-DQA1*01:03-B1*06:01L
TANPKTPKYKF

SEQ ID NO: 26027 - protein, 12 aa, Severe acute respiratory syndrome coronavirus 2
  REGION 1..12: note = Table B: HLA-DQA1*01:03-B1*06:01L
PSGVYQCAMRPN

SEQ ID NO: 26028 - protein, 14 aa, Severe acute respiratory syndrome coronavirus 2
  REGION 1..14: note = Table B: HLA-DQA1*01:03-B1*06:01L
FLNGSCGSVGFNID

SEQ ID NO: 26029 - protein, 12 aa, Severe acute respiratory syndrome coronavirus 2
  REGION 1..12: note = Table B: HLA-DQA1*01:03-B1*06:01L HLA-DRB1*04:08L
LPTGVHAGTDLE

SEQ ID NO: 26030 - protein, 12 aa, Severe acute respiratory syndrome coronavirus 2
  REGION 1..12: note = Table B: HLA-DQA1*01:03-B1*06:01L
AGTDTTITVNVL

SEQ ID NO: 26031 - protein, 13 aa, Severe acute respiratory syndrome coronavirus 2
  REGION 1..13: note = Table B: HLA-DQA1*01:03-B1*06:01L
VLDMCASLKELLQ

SEQ ID NO: 26032 - protein, 10 aa, Severe acute respiratory syndrome coronavirus 2
  REGION 1..10: note = Table B: HLA-DQA1*01:03-B1*06:01L
ILGSALLEDE

SEQ ID NO: 26033 - protein, 12 aa, Severe acute respiratory syndrome coronavirus 2
  REGION 1..12: note = Table B: HLA-DQA1*01:03-B1*06:01L
LGSALLEDEFTP

SEQ ID NO: 26034 - protein, 10 aa, Severe acute respiratory syndrome coronavirus 2
  REGION 1..10: note = Table B: HLA-DQA1*01:03-B1*06:01L
SAFAMMFVKH

SEQ ID NO: 26035 - protein, 11 aa, Severe acute respiratory syndrome coronavirus 2
  REGION 1..11: note = Table B: HLA-DQA1*01:03-B1*06:01L
YFNMVYMPASW

SEQ ID NO: 26036 - protein, 11 aa, Severe acute respiratory syndrome coronavirus 2
  REGION 1..11: note = Table B: HLA-DQA1*01:03-B1*06:01L
VDTSLSGFKLK

SEQ ID NO: 26037 - protein, 10 aa, Severe acute respiratory syndrome coronavirus 2
  REGION 1..10: note = Table B: HLA-DQA1*01:03-B1*06:01L
LKDCVMYASA

SEQ ID NO: 26038 - protein, 10 aa, Severe acute respiratory syndrome coronavirus 2
  REGION 1..10: note = Table B: HLA-DQA1*01:03-B1*06:01L
LMTARTVYDD

SEQ ID NO: 26039 - protein, 14 aa, Severe acute respiratory syndrome coronavirus 2
  REGION 1..14: note = Table B: HLA-DQA1*01:03-B1*06:01L
GVGGKPCIKVATVQ

SEQ ID NO: 26040 - protein, 11 aa, Severe acute respiratory syndrome coronavirus 2
  REGION 1..11: note = Table B: HLA-DQA1*01:03-B1*06:01L
SSSKLWAQCVQ

SEQ ID NO: 26041 - protein, 11 aa, Severe acute respiratory syndrome coronavirus 2
  REGION 1..11: note = Table B: HLA-DQA1*01:03-B1*06:01L
NRATLQAIASE

SEQ ID NO: 26042 - protein, 13 aa, Severe acute respiratory syndrome coronavirus 2
  REGION 1..13: note = Table B: HLA-DQA1*01:03-B1*06:01L
SLPSYAAFATAQE

SEQ ID NO: 26043 - protein, 11 aa, Severe acute respiratory syndrome coronavirus 2
  REGION 1..11: note = Table B: HLA-DQA1*01:03-B1*06:01L HLA-DQA1*02:01-B1*03:03L
GDSEVVLKKLK

SEQ ID NO: 26044 - protein, 11 aa, Severe acute respiratory syndrome coronavirus 2
  REGION 1..11: note = Table B: HLA-DQA1*01:03-B1*06:01L
DQAMTQMYKQA

SEQ ID NO: 26045 - protein, 11 aa, Severe acute respiratory syndrome coronavirus 2
  REGION 1..11: note = Table B: HLA-DQA1*01:03-B1*06:01L
QAMTQMYKQAR

SEQ ID NO: 26046 - protein, 14 aa, Severe acute respiratory syndrome coronavirus 2
  REGION 1..14: note = Table B: HLA-DQA1*01:03-B1*06:01L
ARDGCVPLNIIPLT

SEQ ID NO: 26047 - protein, 11 aa, Severe acute respiratory syndrome coronavirus 2
  REGION 1..11: note = Table B: HLA-DQA1*01:03-B1*06:01L
TTAAKLMVVIP

SEQ ID NO: 26048 - protein, 11 aa, Severe acute respiratory syndrome coronavirus 2
  REGION 1..11: note = Table B: HLA-DQA1*01:03-B1*06:01L
TAAKLMVVIPD

SEQ ID NO: 26049 - protein, 12 aa, Severe acute respiratory syndrome coronavirus 2
  REGION 1..12: note = Table B: HLA-DQA1*01:03-B1*06:01L HLA-DRB1*15:03L
IQQVVDADSKIV

SEQ ID NO: 26050 - protein, 12 aa, Severe acute respiratory syndrome coronavirus 2
  REGION 1..12: note = Table B: HLA-DQA1*01:03-B1*06:01L
QNNELSPVALRQ

SEQ ID NO: 26051 - protein, 11 aa, Severe acute respiratory syndrome coronavirus 2
  REGION 1..11: note = Table B: HLA-DQA1*01:03-B1*06:01L
DLKWARFPKSD

SEQ ID NO: 26052 - protein, 12 aa, Severe acute respiratory syndrome coronavirus 2
  REGION 1..12: note = Table B: HLA-DQA1*01:03-B1*06:01L
SDGTGTIYTELE

SEQ ID NO: 26053 - protein, 10 aa, Severe acute respiratory syndrome coronavirus 2
  REGION 1..10: note = Table B: HLA-DQA1*01:03-B1*06:01L
NRGMVLGSLA

SEQ ID NO: 26054 - protein, 11 aa, Severe acute respiratory syndrome coronavirus 2
  REGION 1..11: note = Table B: HLA-DQA1*01:03-B1*06:01L
SFCAFAVDAAK

SEQ ID NO: 26055 - protein, 10 aa, Severe acute respiratory syndrome coronavirus 2
  REGION 1..10: note = Table B: HLA-DQA1*01:03-B1*06:01L HLA-DQA1*02:01-B1*03:03L
THTGTGQAIT

SEQ ID NO: 26056 - protein, 12 aa, Severe acute respiratory syndrome coronavirus 2
  REGION 1..12: note = Table B: HLA-DQA1*01:03-B1*06:01L
HTGTGQAITVTP

SEQ ID NO: 26057 - protein, 13 aa, Severe acute respiratory syndrome coronavirus 2
  REGION 1..13: note = Table B: HLA-DQA1*01:03-B1*06:01L
DQESFGGASCCLY

SEQ ID NO: 26058 - protein, 13 aa, Severe acute respiratory syndrome coronavirus 2
  REGION 1..13: note = Table B: HLA-DQA1*01:03-B1*06:01L
ESFGGASCCLYCR

SEQ ID NO: 26059 - protein, 14 aa, Severe acute respiratory syndrome coronavirus 2
  REGION 1..14: note = Table B: HLA-DQA1*01:03-B1*06:01L
WKGYGCSCDQLREP

SEQ ID NO: 26060 - protein, 11 aa, Severe acute respiratory syndrome coronavirus 2
  REGION 1..11: note = Table B: HLA-DQA1*01:03-B1*06:01L
PMLQSADAQSF

SEQ ID NO: 26061 - protein, 10 aa, Severe acute respiratory syndrome coronavirus 2
  REGION 1..10: note = Table B: HLA-DQA1*01:03-B1*06:01L
LQSADAQSFL

SEQ ID NO: 26062 - protein, 11 aa, Severe acute respiratory syndrome coronavirus 2
  REGION 1..11: note = Table B: HLA-DQA1*01:03-B1*06:01L
DAQSFLNRVCG

SEQ ID NO: 26063 - protein, 12 aa, Severe acute respiratory syndrome coronavirus 2
  REGION 1..12: note = Table B: HLA-DQA1*01:03-B1*06:01L
TDVVYRAFDIYN

SEQ ID NO: 26064 - protein, 15 aa, Severe acute respiratory syndrome coronavirus 2
  REGION 1..15: note = Table B: HLA-DQA1*01:03-B1*06:01L
AKFLKTNCCRFQEKD

SEQ ID NO: 26065 - protein, 14 aa, Severe acute respiratory syndrome coronavirus 2
  REGION 1..14: note = Table B: HLA-DQA1*01:03-B1*06:01L
FLKTNCCRFQEKDE

SEQ ID NO: 26066 - protein, 14 aa, Severe acute respiratory syndrome coronavirus 2
  REGION 1..14: note = Table B: HLA-DQA1*01:03-B1*06:01L
LKTNCCRFQEKDED

SEQ ID NO: 26067 - protein, 14 aa, Severe acute respiratory syndrome coronavirus 2
  REGION 1..14: note = Table B: HLA-DQA1*01:03-B1*06:01L
HEETIYNLLKDCPA

SEQ ID NO: 26068 - protein, 11 aa, Severe acute respiratory syndrome coronavirus 2
  REGION 1..11: note = Table B: HLA-DQA1*01:03-B1*06:01L
DGDMVPHISRQ

SEQ ID NO: 26069 - protein, 11 aa, Severe acute respiratory syndrome coronavirus 2
  REGION 1..11: note = Table B: HLA-DQA1*01:03-B1*06:01L
ANLGERVRQAL

SEQ ID NO: 26070 - protein, 11 aa, Severe acute respiratory syndrome coronavirus 2
  REGION 1..11: note = Table B: HLA-DQA1*01:03-B1*06:01L
MRNAGIVGVLT

SEQ ID NO: 26071 - protein, 13 aa, Severe acute respiratory syndrome coronavirus 2
  REGION 1..13: note = Table B: HLA-DQA1*01:03-B1*06:01L
TLDNQDLNGNWYD

SEQ ID NO: 26072 - protein, 12 aa, Severe acute respiratory syndrome coronavirus 2
  REGION 1..12: note = Table B: HLA-DQA1*01:03-B1*06:01L
PGSGVPVVDSYY

SEQ ID NO: 26073 - protein, 11 aa, Severe acute respiratory syndrome coronavirus 2
  REGION 1..11: note = Table B: HLA-DQA1*01:03-B1*06:01L
KYDFTEERLKL

SEQ ID NO: 26074 - protein, 10 aa, Severe acute respiratory syndrome coronavirus 2
  REGION 1..10: note = Table B: HLA-DQA1*01:03-B1*06:01L
SFGPLVRKIF

SEQ ID NO: 26075 - protein, 11 aa, Severe acute respiratory syndrome coronavirus 2
  REGION 1..11: note = Table B: HLA-DQA1*01:03-B1*06:01L
VVSTGYHFREL

SEQ ID NO: 26076 - protein, 11 aa, Severe acute respiratory syndrome coronavirus 2
  REGION 1..11: note = Table B: HLA-DQA1*01:03-B1*06:01L
VSTGYHFRELG

SEQ ID NO: 26077 - protein, 12 aa, Severe acute respiratory syndrome coronavirus 2
  REGION 1..12: note = Table B: HLA-DQA1*01:03-B1*06:01L HLA-DQA1*02:01-B1*03:03L
EDQDALFAYTKR

SEQ ID NO: 26078 - protein, 12 aa, Severe acute respiratory syndrome coronavirus 2
  REGION 1..12: note = Table B: HLA-DQA1*01:03-B1*06:01L HLA-DQA1*02:01-B1*03:03L
ITQMNLKYAISA

SEQ ID NO: 26079 - protein, 12 aa, Severe acute respiratory syndrome coronavirus 2
  REGION 1..12: note = Table B: HLA-DQA1*01:03-B1*06:01L
RTVAGVSICSTM

SEQ ID NO: 26080 - protein, 12 aa, Severe acute respiratory syndrome coronavirus 2
  REGION 1..12: note = Table B: HLA-DQA1*01:03-B1*06:01L
SICSTMTNRQFH

SEQ ID NO: 26081 - protein, 12 aa, Severe acute respiratory syndrome coronavirus 2
  REGION 1..12: note = Table B: HLA-DQA1*01:03-B1*06:01L
ICSTMTNRQFHQ

SEQ ID NO: 26082 - protein, 10 aa, Severe acute respiratory syndrome coronavirus 2
  REGION 1..10: note = Table B: HLA-DQA1*01:03-B1*06:01L HLA-DQA1*02:01-B1*03:03L
RGATVVIGTS

SEQ ID NO: 26083 - protein, 15 aa, Severe acute respiratory syndrome coronavirus 2
  REGION 1..15: note = Table B: HLA-DQA1*01:03-B1*06:01L
NPHLMGWDYPKCDRA

SEQ ID NO: 26084 - protein, 15 aa, Severe acute respiratory syndrome coronavirus 2
  REGION 1..15: note = Table B: HLA-DQA1*01:03-B1*06:01L
KPGGTSSGDATTAYA

SEQ ID NO: 26085 - protein, 11 aa, Severe acute respiratory syndrome coronavirus 2
  REGION 1..11: note = Table B: HLA-DQA1*01:03-B1*06:01L
TDFVNEFYAYL

SEQ ID NO: 26086 - protein, 12 aa, Severe acute respiratory syndrome coronavirus 2
  REGION 1..12: note = Table B: HLA-DQA1*01:03-B1*06:01L
DDAVVCFNSTYA

SEQ ID NO: 26087 - protein, 10 aa, Severe acute respiratory syndrome coronavirus 2
  REGION 1..10: note = Table B: HLA-DQA1*01:03-B1*06:01L HLA-DQA1*02:01-B1*03:03L
QNNVFMSEAK

SEQ ID NO: 26088 - protein, 11 aa, Severe acute respiratory syndrome coronavirus 2
  REGION 1..11: note = Table B: HLA-DQA1*01:03-B1*06:01L
DYVYLPYPDPS

SEQ ID NO: 26089 - protein, 17 aa, Severe acute respiratory syndrome coronavirus 2
  REGION 1..17: note = Table B: HLA-DQA1*01:03-B1*06:01L
PDPSRILGAGCFVDDIV

SEQ ID NO: 26090 - protein, 10 aa, Severe acute respiratory syndrome coronavirus 2
  REGION 1..10: note = Table B: HLA-DQA1*01:03-B1*06:01L
DGTLMIERFV

SEQ ID NO: 26091 - protein, 10 aa, Severe acute respiratory syndrome coronavirus 2
  REGION 1..10: note = Table B: HLA-DQA1*01:03-B1*06:01L
GTLMIERFVS

SEQ ID NO: 26092 - protein, 11 aa, Severe acute respiratory syndrome coronavirus 2
  REGION 1..11: note = Table B: HLA-DQA1*01:03-B1*06:01L
TGHMLDMYSVM

SEQ ID NO: 26093 - protein, 11 aa, Severe acute respiratory syndrome coronavirus 2
  REGION 1..11: note = Table B: HLA-DQA1*01:03-B1*06:01L
DNTSRYWEPEF

SEQ ID NO: 26094 - protein, 13 aa, Severe acute respiratory syndrome coronavirus 2
  REGION 1..13: note = Table B: HLA-DQA1*01:03-B1*06:01L
LQAVGACVLCNSQ

SEQ ID NO: 26095 - protein, 12 aa, Severe acute respiratory syndrome coronavirus 2
  REGION 1..12: note = Table B: HLA-DQA1*01:03-B1*06:01L
AVGACVLCNSQT

SEQ ID NO: 26096 - protein, 12 aa, Severe acute respiratory syndrome coronavirus 2
  REGION 1..12: note = Table B: HLA-DQA1*01:03-B1*06:01L
VGACVLCNSQTS

SEQ ID NO: 26097 - protein, 11 aa, Severe acute respiratory syndrome coronavirus 2
  REGION 1..11: note = Table B: HLA-DQA1*01:03-B1*06:01L
YDHVISTSHKL

SEQ ID NO: 26098 - protein, 14 aa, Severe acute respiratory syndrome coronavirus 2
  REGION 1..14: note = Table B: HLA-DQA1*01:03-B1*06:01L
ISTSHKLVLSVNPY

SEQ ID NO: 26099 - protein, 12 aa, Severe acute respiratory syndrome coronavirus 2
  REGION 1..12: note = Table B: HLA-DQA1*01:03-B1*06:01L HLA-DQA1*02:01-B1*03:03L
DVTDVTQLYLGG

SEQ ID NO: 26100 - protein, 15 aa, Severe acute respiratory syndrome coronavirus 2
  REGION 1..15: note = Table B: HLA-DQA1*01:03-B1*06:01L
GLYKNTCVGSDNVTD

SEQ ID NO: 26101 - protein, 12 aa, Severe acute respiratory syndrome coronavirus 2
  REGION 1..12: note = Table B: HLA-DQA1*01:03-B1*06:01L
AIATCDWTNAGD

SEQ ID NO: 26102 - protein, 12 aa, Severe acute respiratory syndrome coronavirus 2
  REGION 1..12: note = Table B: HLA-DQA1*01:03-B1*06:01L
DWTNAGDYILAN

SEQ ID NO: 26103 - protein, 11 aa, Severe acute respiratory syndrome coronavirus 2
  REGION 1..11: note = Table B: HLA-DQA1*01:03-B1*06:01L
TNAGDYILANT

SEQ ID NO: 26104 - protein, 13 aa, Severe acute respiratory syndrome coronavirus 2
  REGION 1..13: note = Table B: HLA-DQA1*01:03-B1*06:01L
LKATEETFKLSYG

SEQ ID NO: 26105 - protein, 13 aa, Severe acute respiratory syndrome coronavirus 2
  REGION 1..13: note = Table B: HLA-DQA1*01:03-B1*06:01L
YRVTKNSKVQIGE

SEQ ID NO: 26106 - protein, 11 aa, Severe acute respiratory syndrome coronavirus 2
  REGION 1..11: note = Table B: HLA-DQA1*01:03-B1*06:01L
NVGDYFVLTSH

SEQ ID NO: 26107 - protein, 11 aa, Severe acute respiratory syndrome coronavirus 2
  REGION 1..11: note = Table B: HLA-DQA1*01:03-B1*06:01L
TSHTVMPLSAP

SEQ ID NO: 26108 - protein, 11 aa, Severe acute respiratory syndrome coronavirus 2
  REGION 1..11: note = Table B: HLA-DQA1*01:03-B1*06:01L
LYPTLNISDEF

SEQ ID NO: 26109 - protein, 10 aa, Severe acute respiratory syndrome coronavirus 2
  REGION 1..10: note = Table B: HLA-DQA1*01:03-B1*06:01L
GTGKSHFAIG

SEQ ID NO: 26110 - protein, 13 aa, Severe acute respiratory syndrome coronavirus 2
  REGION 1..13: note = Table B: HLA-DQA1*01:03-B1*06:01L
SHAAVDALCEKAL

SEQ ID NO: 26111 - protein, 12 aa, Severe acute respiratory syndrome coronavirus 2
  REGION 1..12: note = Table B: HLA-DQA1*01:03-B1*06:01L HLA-DRB1*15:03L
AVDALCEKALKY

SEQ ID NO: 26112 - protein, 11 aa, Severe acute respiratory syndrome coronavirus 2
  REGION 1..11: note = Table B: HLA-DQA1*01:03-B1*06:01L
PETTADIVVFD

SEQ ID NO: 26113 - protein, 10 aa, Severe acute respiratory syndrome coronavirus 2
  REGION 1..10: note = Table B: HLA-DQA1*01:03-B1*06:01L
TTADIVVFDE

SEQ ID NO: 26114 - protein, 10 aa, Severe acute respiratory syndrome coronavirus 2
  REGION 1..10: note = Table B: HLA-DQA1*01:03-B1*06:01L
DTVSALVYDN

SEQ ID NO: 26115 - protein, 14 aa, Severe acute respiratory syndrome coronavirus 2
  REGION 1..14: note = Table B: HLA-DQA1*01:03-B1*06:01L
AHKDKSAQCFKMFY

SEQ ID NO: 26116 - protein, 12 aa, Severe acute respiratory syndrome coronavirus 2
  REGION 1..12: note = Table B: HLA-DQA1*01:03-B1*06:01L
QNAVASKILGLP

SEQ ID NO: 26117 - protein, 10 aa, Severe acute respiratory syndrome coronavirus 2
  REGION 1..10: note = Table B: HLA-DQA1*01:03-B1*06:01L
VASKILGLPT

SEQ ID NO: 26118 - protein, 14 aa, Severe acute respiratory syndrome coronavirus 2
  REGION 1..14: note = Table B: HLA-DQA1*01:03-B1*06:01L
DSSQGSEYDYVIFT

SEQ ID NO: 26119 - protein, 11 aa, Severe acute respiratory syndrome coronavirus 2
  REGION 1..11: note = Table B: HLA-DQA1*01:03-B1*06:01L
TQTTETAHSCN

SEQ ID NO: 26120 - protein, 10 aa, Severe acute respiratory syndrome coronavirus 2
  REGION 1..10: note = Table B: HLA-DQA1*01:03-B1*06:01L
TETAHSCNVN

SEQ ID NO: 26121 - protein, 10 aa, Severe acute respiratory syndrome coronavirus 2
  REGION 1..10: note = Table B: HLA-DQA1*01:03-B1*06:01L
NVTGLFKDCS

SEQ ID NO: 26122 - protein, 14 aa, Severe acute respiratory syndrome coronavirus 2
  REGION 1..14: note = Table B: HLA-DQA1*01:03-B1*06:01L
KTEGLCVDIPGIPK

SEQ ID NO: 26123 - protein, 11 aa, Severe acute respiratory syndrome coronavirus 2
  REGION 1..11: note = Table B: HLA-DQA1*01:03-B1*06:01L HLA-DQA1*02:01-B1*03:03L
VDIPGIPKDMT

SEQ ID NO: 26124 - protein, 12 aa, Severe acute respiratory syndrome coronavirus 2
  REGION 1..12: note = Table B: HLA-DQA1*01:03-B1*06:01L
DIPGIPKDMTYR

SEQ ID NO: 26125 - protein, 13 aa, Severe acute respiratory syndrome coronavirus 2
  REGION 1..13: note = Table B: HLA-DQA1*01:03-B1*06:01L
MFITREEAIRHVR

SEQ ID NO: 26126 - protein, 10 aa, Severe acute respiratory syndrome coronavirus 2
  REGION 1..10: note = Table B: HLA-DQA1*01:03-B1*06:01L
VEGCHATREA

SEQ ID NO: 26127 - protein, 11 aa, Severe acute respiratory syndrome coronavirus 2
  REGION 1..11: note = Table B: HLA-DQA1*01:03-B1*06:01L
FSTGVNLVAVP

SEQ ID NO: 26128 - protein, 10 aa, Severe acute respiratory syndrome coronavirus 2
  REGION 1..10: note = Table B: HLA-DQA1*01:03-B1*06:01L
MYKGLPWNVV

SEQ ID NO: 26129 - protein, 11 aa, Severe acute respiratory syndrome coronavirus 2
  REGION 1..11: note = Table B: HLA-DQA1*01:03-B1*06:01L
LSDTLKNLSDR

SEQ ID NO: 26130 - protein, 13 aa, Severe acute respiratory syndrome coronavirus 2
  REGION 1..13: note = Table B: HLA-DQA1*01:03-B1*06:01L
LSDRVVFVLWAHG

SEQ ID NO: 26131 - protein, 11 aa, Severe acute respiratory syndrome coronavirus 2
  REGION 1..11: note = Table B: HLA-DQA1*01:03-B1*06:01L
STASDTYACWH

SEQ ID NO: 26132 - protein, 13 aa, Severe acute respiratory syndrome coronavirus 2
  REGION 1..13: note = Table B: HLA-DQA1*01:03-B1*06:01L HLA-DQA1*02:01-B1*03:03L
DIGNPKAIKCVPQ

SEQ ID NO: 26133 - protein, 10 aa, Severe acute respiratory syndrome coronavirus 2
  REGION 1..10: note = Table B: HLA-DQA1*01:03-B1*06:01L
SAGFSLWVYK

SEQ ID NO: 26134 - protein, 15 aa, Severe acute respiratory syndrome coronavirus 2
  REGION 1..15: note = Table B: HLA-DQA1*01:03-B1*06:01L
VVNKGHFDGQQGEVP

SEQ ID NO: 26135 - protein, 12 aa, Severe acute respiratory syndrome coronavirus 2
  REGION 1..12: note = Table B: HLA-DQA1*01:03-B1*06:01L
QQGEVPVSIINN

SEQ ID NO: 26136 - protein, 11 aa, Severe acute respiratory syndrome coronavirus 2
  REGION 1..11: note = Table B: HLA-DQA1*01:03-B1*06:01L HLA-DQA1*02:01-B1*03:03L
DGVDVELFENK

SEQ ID NO: 26137 - protein, 14 aa, Severe acute respiratory syndrome coronavirus 2
  REGION 1..14: note = Table B: HLA-DQA1*01:03-B1*06:01L HLA-DRB1*08:02L
IWDYKRDAPAHIST

SEQ ID NO: 26138 - protein, 15 aa, Severe acute respiratory syndrome coronavirus 2
  REGION 1..15: note = Table B: HLA-DQA1*01:03-B1*06:01L
VDLFRNARNGVLITE

SEQ ID NO: 26139 - protein, 12 aa, Severe acute respiratory syndrome coronavirus 2
  REGION 1..12: note = Table B: HLA-DQA1*01:03-B1*06:01L
NARNGVLITEGS

SEQ ID NO: 26140 - protein, 12 aa, Severe acute respiratory syndrome coronavirus 2
  REGION 1..12: note = Table B: HLA-DQA1*01:03-B1*06:01L
ARNGVLITEGSV

SEQ ID NO: 26141 - protein, 14 aa, Severe acute respiratory syndrome coronavirus 2
  REGION 1..14: note = Table B: HLA-DQA1*01:03-B1*06:01L
LQPSVGPKQASLNG

SEQ ID NO: 26142 - protein, 12 aa, Severe acute respiratory syndrome coronavirus 2
  REGION 1..12: note = Table B: HLA-DQA1*01:03-B1*06:01L
KVDGVVQQLPET

SEQ ID NO: 26143 - protein, 12 aa, Severe acute respiratory syndrome coronavirus 2
  REGION 1..12: note = Table B: HLA-DQA1*01:03-B1*06:01L
QLPETYFTQSRN

SEQ ID NO: 26144 - protein, 11 aa, Severe acute respiratory syndrome coronavirus 2
  REGION 1..11: note = Table B: HLA-DQA1*01:03-B1*06:01L
SQLGGLHLLIG

SEQ ID NO: 26145 - protein, 13 aa, Severe acute respiratory syndrome coronavirus 2
  REGION 1..13: note = Table B: HLA-DQA1*01:03-B1*06:01L
TVKNYFITDAQTG

SEQ ID NO: 26146 - protein, 10 aa, Severe acute respiratory syndrome coronavirus 2
  REGION 1..10: note = Table B: HLA-DQA1*01:03-B1*06:01L
DDFVEIIKSQ

SEQ ID NO: 26147 - protein, 11 aa, Severe acute respiratory syndrome coronavirus 2
  REGION 1..11: note = Table B: HLA-DQA1*01:03-B1*06:01L
IKSQDLSVVSK

SEQ ID NO: 26148 - protein, 10 aa, Severe acute respiratory syndrome coronavirus 2
  REGION 1..10: note = Table B: HLA-DQA1*01:03-B1*06:01L
PKGIMMNVAK

SEQ ID NO: 26149 - protein, 13 aa, Severe acute respiratory syndrome coronavirus 2
  REGION 1..13: note = Table B: HLA-DQA1*01:03-B1*06:01L
KYTQLCQYLNTLT

SEQ ID NO: 26150 - protein, 12 aa, Severe acute respiratory syndrome coronavirus 2
  REGION 1..12: note = Table B: HLA-DQA1*01:03-B1*06:01L
APGTAVLRQWLP

SEQ ID NO: 26151 - protein, 12 aa, Severe acute respiratory syndrome coronavirus 2
  REGION 1..12: note = Table B: HLA-DQA1*01:03-B1*06:01L
GTAVLRQWLPTG

SEQ ID NO: 26152 - protein, 10 aa, Severe acute respiratory syndrome coronavirus 2
  REGION 1..10: note = Table B: HLA-DQA1*01:03-B1*06:01L
PTGTLLVDSD

SEQ ID NO: 26153 - protein, 13 aa, Severe acute respiratory syndrome coronavirus 2
  REGION 1..13: note = Table B: HLA-DQA1*01:03-B1*06:01L
VSDADSTLIGDCA

SEQ ID NO: 26154 - protein, 12 aa, Severe acute respiratory syndrome coronavirus 2
  REGION 1..12: note = Table B: HLA-DQA1*01:03-B1*06:01L
DADSTLIGDCAT

SEQ ID NO: 26155 - protein, 10 aa, Severe acute respiratory syndrome coronavirus 2
  REGION 1..10: note = Table B: HLA-DQA1*01:03-B1*06:01L
DCATVHTANK

SEQ ID NO: 26156 - protein, 12 aa, Severe acute respiratory syndrome coronavirus 2
  REGION 1..12: note = Table B: HLA-DQA1*01:03-B1*06:01L
VHTANKWDLIIS

SEQ ID NO: 26157 - protein, 12 aa, Severe acute respiratory syndrome coronavirus 2
  REGION 1..12: note = Table B: HLA-DQA1*01:03-B1*06:01L
VTKENDSKEGFF

SEQ ID NO: 26158 - protein, 10 aa, Severe acute respiratory syndrome coronavirus 2
  REGION 1..10: note = Table B: HLA-DQA1*01:03-B1*06:01L
ICGFIQQKLA

SEQ ID NO: 26159 - protein, 13 aa, Severe acute respiratory syndrome coronavirus 2
  REGION 1..13: note = Table B: HLA-DQA1*01:03-B1*06:01L
QQKLALGGSVAIK

SEQ ID NO: 26160 - protein, 11 aa, Severe acute respiratory syndrome coronavirus 2
  REGION 1..11: note = Table B: HLA-DQA1*01:03-B1*06:01L
NASSSEAFLIG

SEQ ID NO: 26161 - protein, 12 aa, Severe acute respiratory syndrome coronavirus 2
  REGION 1..12: note = Table B: HLA-DQA1*01:03-B1*06:01L
ASSSEAFLIGCN

SEQ ID NO: 26162 - protein, 15 aa, Severe acute respiratory syndrome coronavirus 2
  REGION 1..15: note = Table B: HLA-DQA1*01:03-B1*06:01L
SSEAFLIGCNYLGKP

SEQ ID NO: 26163 - protein, 14 aa, Severe acute respiratory syndrome coronavirus 2
  REGION 1..14: note = Table B: HLA-DQA1*01:03-B1*06:01L HLA-DRB1*15:03L
FLIGCNYLGKPREQ

SEQ ID NO: 26164 - protein, 14 aa, Severe acute respiratory syndrome coronavirus 2
  REGION 1..14: note = Table B: HLA-DQA1*01:03-B1*06:01L
TRGVYYPDKVFRSS

SEQ ID NO: 26165 - protein, 10 aa, Severe acute respiratory syndrome coronavirus 2
  REGION 1..10: note = Table B: HLA-DQA1*01:03-B1*06:01L
KRFDNPVLPF

SEQ ID NO: 26166 - protein, 13 aa, Severe acute respiratory syndrome coronavirus 2
  REGION 1..13: note = Table B: HLA-DQA1*01:03-B1*06:01L
LPFNDGVYFASTE

SEQ ID NO: 26167 - protein, 11 aa, Severe acute respiratory syndrome coronavirus 2
  REGION 1..11: note = Table B: HLA-DQA1*01:03-B1*06:01L
NDGVYFASTEK

SEQ ID NO: 26168 - protein, 10 aa, Severe acute respiratory syndrome coronavirus 2
  REGION 1..10: note = Table B: HLA-DQA1*01:03-B1*06:01L
ATNVVIKVCE

SEQ ID NO: 26169 - protein, 13 aa, Severe acute respiratory syndrome coronavirus 2
  REGION 1..13: note = Table B: HLA-DQA1*01:03-B1*06:01L
WMESEFRVYSSAN

SEQ ID NO: 26170 - protein, 12 aa, Severe acute respiratory syndrome coronavirus 2
  REGION 1..12: note = Table B: HLA-DQA1*01:03-B1*06:01L
ANNCTFEYVSQP

SEQ ID NO: 26171 - protein, 11 aa, Severe acute respiratory syndrome coronavirus 2
  REGION 1..11: note = Table B: HLA-DQA1*01:03-B1*06:01L
FQTLLALHRSY

SEQ ID NO: 26172 - protein, 13 aa, Severe acute respiratory syndrome coronavirus 2
  REGION 1..13: note = Table B: HLA-DQA1*01:03-B1*06:01L
SSGWTAGAAAYYV

SEQ ID NO: 26173 - protein, 10 aa, Severe acute respiratory syndrome coronavirus 2
  REGION 1..10: note = Table B: HLA-DQA1*01:03-B1*06:01L
TAGAAAYYVG

SEQ ID NO: 26174 - protein, 11 aa, Severe acute respiratory syndrome coronavirus 2
  REGION 1..11: note = Table B: HLA-DQA1*01:03-B1*06:01L
ISNCVADYSVL

SEQ ID NO: 26175 - protein, 10 aa, Severe acute respiratory syndrome coronavirus 2
  REGION 1..10: note = Table B: HLA-DQA1*01:03-B1*06:01L HLA-DQA1*02:01-B1*03:03L
GQTGKIADYN

SEQ ID NO: 26176 - protein, 10 aa, Severe acute respiratory syndrome coronavirus 2
  REGION 1..10: note = Table B: HLA-DQA1*01:03-B1*06:01L
TGCVIAWNSN

SEQ ID NO: 26177 - protein, 12 aa, Severe acute respiratory syndrome coronavirus 2
  REGION 1..12: note = Table B: HLA-DQA1*01:03-B1*06:01L
DISTEIYQAGST

SEQ ID NO: 26178 - protein, 11 aa, Severe acute respiratory syndrome coronavirus 2
  REGION 1..11: note = Table B: HLA-DQA1*01:03-B1*06:01L
NCYFPLQSYGF

SEQ ID NO: 26179 - protein, 10 aa, Severe acute respiratory syndrome coronavirus 2
  REGION 1..10: note = Table B: HLA-DQA1*01:03-B1*06:01L HLA-DQA1*02:01-B1*03:03L
TGTGVLTESN

SEQ ID NO: 26180 - protein, 11 aa, Severe acute respiratory syndrome coronavirus 2
  REGION 1..11: note = Table B: HLA-DQA1*01:03-B1*06:01L
DITPCSFGGVS

SEQ ID NO: 26181 - protein, 12 aa, Severe acute respiratory syndrome coronavirus 2
  REGION 1..12: note = Table B: HLA-DQA1*01:03-B1*06:01L
TNTSNQVAVLYQ

SEQ ID NO: 26182 - protein, 12 aa, Severe acute respiratory syndrome coronavirus 2
  REGION 1..12: note = Table B: HLA-DQA1*01:03-B1*06:01L
TSNQVAVLYQDV

SEQ ID NO: 26183 - protein, 10 aa, Severe acute respiratory syndrome coronavirus 2
  REGION 1..10: note = Table B: HLA-DQA1*01:03-B1*06:01L
NCTEVPVAIH

SEQ ID NO: 26184 - protein, 11 aa, Severe acute respiratory syndrome coronavirus 2
  REGION 1..11: note = Table B: HLA-DQA1*01:03-B1*06:01L
AGCLIGAEHVN

SEQ ID NO: 26185 - protein, 12 aa, Severe acute respiratory syndrome coronavirus 2
  REGION 1..12: note = Table B: HLA-DQA1*01:03-B1*06:01L
IGAGICASYQTQ

SEQ ID NO: 26186 - protein, 11 aa, Severe acute respiratory syndrome coronavirus 2
  REGION 1..11: note = Table B: HLA-DQA1*01:03-B1*06:01L
VASQSIIAYTM

SEQ ID NO: 26187 - protein, 12 aa, Severe acute respiratory syndrome coronavirus 2
  REGION 1..12: note = Table B: HLA-DQA1*01:03-B1*06:01L
STECSNLLLQYG

SEQ ID NO: 26188 - protein, 10 aa, Severe acute respiratory syndrome coronavirus 2
  REGION 1..10: note = Table B: HLA-DQA1*01:03-B1*06:01L
FCTQLNRALT

SEQ ID NO: 26189 - protein, 17 aa, Severe acute respiratory syndrome coronavirus 2
  REGION 1..17: note = Table B: HLA-DQA1*01:03-B1*06:01L
LPDPSKPSKRSFIEDLL

SEQ ID NO: 26190 - protein, 11 aa, Severe acute respiratory syndrome coronavirus 2
  REGION 1..11: note = Table B: HLA-DQA1*01:03-B1*06:01L
TLADAGFIKQY

SEQ ID NO: 26191 - protein, 13 aa, Severe acute respiratory syndrome coronavirus 2
  REGION 1..13: note = Table B: HLA-DQA1*01:03-B1*06:01L
LTDEMIAQYTSAL

SEQ ID NO: 26192 - protein, 10 aa, Severe acute respiratory syndrome coronavirus 2
  REGION 1..10: note = Table B: HLA-DQA1*01:03-B1*06:01L
TSALLAGTIT

SEQ ID NO: 26193 - protein, 10 aa, Severe acute respiratory syndrome coronavirus 2
  REGION 1..10: note = Table B: HLA-DQA1*01:03-B1*06:01L
ITSGWTFGAG

SEQ ID NO: 26194 - protein, 13 aa, Severe acute respiratory syndrome coronavirus 2
  REGION 1..13: note = Table B: HLA-DQA1*01:03-B1*06:01L
TSGWTFGAGAALQ

SEQ ID NO: 26195 - protein, 12 aa, Severe acute respiratory syndrome coronavirus 2
  REGION 1..12: note = Table B: HLA-DQA1*01:03-B1*06:01L
LSSNFGAISSVL

SEQ ID NO: 26196 - protein, 10 aa, Severe acute respiratory syndrome coronavirus 2
  REGION 1..10: note = Table B: HLA-DQA1*01:03-B1*06:01L
LAATKMSECV

SEQ ID NO: 26197 - protein, 10 aa, Severe acute respiratory syndrome coronavirus 2
  REGION 1..10: note = Table B: HLA-DQA1*01:03-B1*06:01L
NFTTAPAICH

SEQ ID NO: 26198 - protein, 10 aa, Severe acute respiratory syndrome coronavirus 2
  REGION 1..10: note = Table B: HLA-DQA1*01:03-B1*06:01L
TAPAICHDGK

SEQ ID NO: 26199 - protein, 13 aa, Severe acute respiratory syndrome coronavirus 2
  REGION 1..13: note = Table B: HLA-DQA1*01:03-B1*06:01L
TQRNFYEPQIITT

SEQ ID NO: 26200 - protein, 10 aa, Severe acute respiratory syndrome coronavirus 2
  REGION 1..10: note = Table B: HLA-DQA1*01:03-B1*06:01L
PQIITTDNTF

SEQ ID NO: 26201 - protein, 14 aa, Severe acute respiratory syndrome coronavirus 2
  REGION 1..14: note = Table B: HLA-DQA1*01:03-B1*06:01L
IITTDNTFVSGNCD

SEQ ID NO: 26202 - protein, 12 aa, Severe acute respiratory syndrome coronavirus 2
  REGION 1..12: note = Table B: HLA-DQA1*01:03-B1*06:01L
EDDSEPVLKGVK

SEQ ID NO: 26203 - protein, 12 aa, Severe acute respiratory syndrome coronavirus 2
  REGION 1..12: note = Table B: HLA-DQA1*01:03-B1*06:01L
VTLKQGEIKDAT

SEQ ID NO: 26204 - protein, 11 aa, Severe acute respiratory syndrome coronavirus 2
  REGION 1..11: note = Table B: HLA-DQA1*01:03-B1*06:01L
LKQGEIKDATP

SEQ ID NO: 26205 - protein, 12 aa, Severe acute respiratory syndrome coronavirus 2
  REGION 1..12: note = Table B: HLA-DQA1*01:03-B1*06:01L
TATIPIQASLPF

SEQ ID NO: 26206 - protein, 10 aa, Severe acute respiratory syndrome coronavirus 2
  REGION 1..10: note = Table B: HLA-DQA1*01:03-B1*06:01L
QSINFVRIIM

SEQ ID NO: 26207 - protein, 11 aa, Severe acute respiratory syndrome coronavirus 2
  REGION 1..11: note = Table B: HLA-DQA1*01:03-B1*06:01L
SVTSSIVITSG

SEQ ID NO: 26208 - protein, 13 aa, Severe acute respiratory syndrome coronavirus 2
  REGION 1..13: note = Table B: HLA-DQA1*01:03-B1*06:01L
YYQLYSTQLSTDT

SEQ ID NO: 26209 - protein, 10 aa, Severe acute respiratory syndrome coronavirus 2
  REGION 1..10: note = Table B: HLA-DQA1*01:03-B1*06:01L HLA-DQA1*02:01-B1*03:03L
SGVVNPVMEP

SEQ ID NO: 26210 - protein, 11 aa, Severe acute respiratory syndrome coronavirus 2
  REGION 1..11: note = Table B: HLA-DQA1*01:03-B1*06:01L
LGASQRVAGDS

SEQ ID NO: 26211 - protein, 14 aa, Severe acute respiratory syndrome coronavirus 2
  REGION 1..14: note = Table B: HLA-DQA1*01:03-B1*06:01L HLA-DRB1*15:01L
IGNYKLNTDHSSSS

SEQ ID NO: 26212 - protein, 12 aa, Severe acute respiratory syndrome coronavirus 2
  REGION 1..12: note = Table B: HLA-DQA1*01:03-B1*06:01L
DHSSSSDNIALL

SEQ ID NO: 26213 - protein, 13 aa, Severe acute respiratory syndrome coronavirus 2
  REGION 1..13: note = Table B: HLA-DQA1*01:03-B1*06:01L
HSSSSDNIALLVQ

SEQ ID NO: 26214 - protein, 10 aa, Severe acute respiratory syndrome coronavirus 2
  REGION 1..10: note = Table B: HLA-DQA1*01:03-B1*06:01L
ATCELYHYQE

SEQ ID NO: 26215 - protein, 10 aa, Severe acute respiratory syndrome coronavirus 2
  REGION 1..10: note = Table B: HLA-DQA1*01:03-B1*06:01L
FAFACPDGVK

SEQ ID NO: 26216 - protein, 11 aa, Severe acute respiratory syndrome coronavirus 2
  REGION 1..11: note = Table B: HLA-DQA1*01:03-B1*06:01L
GNYTVSCLPFT

SEQ ID NO: 26217 - protein, 11 aa, Severe acute respiratory syndrome coronavirus 2
  REGION 1..11: note = Table B: HLA-DQA1*01:03-B1*06:01L
PNNTASWFTAL

SEQ ID NO: 26218 - protein, 10 aa, Severe acute respiratory syndrome coronavirus 2
  REGION 1..10: note = Table B: HLA-DQA1*01:03-B1*06:01L
NTASWFTALT

SEQ ID NO: 26219 - protein, 14 aa, Severe acute respiratory syndrome coronavirus 2
  REGION 1..14: note = Table B: HLA-DQA1*01:03-B1*06:01L
NTNSSPDDQIGYYR

SEQ ID NO: 26220 - protein, 11 aa, Severe acute respiratory syndrome coronavirus 2
  REGION 1..11: note = Table B: HLA-DQA1*01:03-B1*06:01L
NKDGIIWVATE

SEQ ID NO: 26221 - protein, 11 aa, Severe acute respiratory syndrome coronavirus 2
  REGION 1..11: note = Table B: HLA-DQA1*01:03-B1*06:01L
NNAAIVLQLPQ

SEQ ID NO: 26222 - protein, 11 aa, Severe acute respiratory syndrome coronavirus 2
  REGION 1..11: note = Table B: HLA-DQA1*01:03-B1*06:01L
NAAIVLQLPQG

SEQ ID NO: 26223 - protein, 15 aa, Severe acute respiratory syndrome coronavirus 2
  REGION 1..15: note = Table B: HLA-DQA1*01:03-B1*06:01L
SRNSSRNSTPGSSRG

SEQ ID NO: 26224 - protein, 14 aa, Severe acute respiratory syndrome coronavirus 2
  REGION 1..14: note = Table B: HLA-DQA1*01:03-B1*06:01L
QQQGQTVTKKSAAE

SEQ ID NO: 26225 - protein, 13 aa, Severe acute respiratory syndrome coronavirus 2
  REGION 1..13: note = Table B: HLA-DQA1*01:03-B1*06:01L
EVTPSGTWLTYTG

SEQ ID NO: 26226 - protein, 13 aa, Severe acute respiratory syndrome coronavirus 2
  REGION 1..13: note = Table B: HLA-DQA1*01:03-B1*06:01L
VTPSGTWLTYTGA

SEQ ID NO: 26227 - protein, 10 aa, Severe acute respiratory syndrome coronavirus 2
  REGION 1..10: note = Table B: HLA-DQA1*01:03-B1*06:01L HLA-DQA1*02:01-B1*03:03L
TYTGAIKLDD

SEQ ID NO: 26228 - protein, 14 aa, Severe acute respiratory syndrome coronavirus 2
  REGION 1..14: note = Table B: HLA-DRB1*04:08L
KTHVQLSLPVLQVR

SEQ ID NO: 26229 - protein, 14 aa, Severe acute respiratory syndrome coronavirus 2
  REGION 1..14: note = Table B: HLA-DRB1*04:08L
VELVAELEGIQYGR

SEQ ID NO: 26230 - protein, 12 aa, Severe acute respiratory syndrome coronavirus 2
  REGION 1..12: note = Table B: HLA-DRB1*04:08L
EGIQYGRSGETL

SEQ ID NO: 26231 - protein, 14 aa, Severe acute respiratory syndrome coronavirus 2
  REGION 1..14: note = Table B: HLA-DRB1*04:08L HLA-DRB1*15:03L
GADLKSFDLGDELG

SEQ ID NO: 26232 - protein, 14 aa, Severe acute respiratory syndrome coronavirus 2
  REGION 1..14: note = Table B: HLA-DRB1*04:08L
NTKHSSGVTRELMR

SEQ ID NO: 26233 - protein, 13 aa, Severe acute respiratory syndrome coronavirus 2
  REGION 1..13: note = Table B: HLA-DRB1*04:08L
TRELMRELNGGAY

SEQ ID NO: 26234 - protein, 12 aa, Severe acute respiratory syndrome coronavirus 2
  REGION 1..12: note = Table B: HLA-DRB1*04:08L
LMRELNGGAYTR

SEQ ID NO: 26235 - protein, 13 aa, Severe acute respiratory syndrome coronavirus 2
  REGION 1..13: note = Table B: HLA-DRB1*04:08L
RELNGGAYTRYVD

SEQ ID NO: 26236 - protein, 15 aa, Severe acute respiratory syndrome coronavirus 2
  REGION 1..15: note = Table B: HLA-DRB1*04:08L
GAYTRYVDNNFCGPD

SEQ ID NO: 26237 - protein, 14 aa, Severe acute respiratory syndrome coronavirus 2
  REGION 1..14: note = Table B: HLA-DRB1*04:08L
EVGPEHSLAEYHNE

SEQ ID NO: 26238 - protein, 14 aa, Severe acute respiratory syndrome coronavirus 2
  REGION 1..14: note = Table B: HLA-DRB1*04:08L
IGCNHTGVVGEGSE

SEQ ID NO: 26239 - protein, 12 aa, Severe acute respiratory syndrome coronavirus 2
  REGION 1..12: note = Table B: HLA-DRB1*04:08L
VKGLDYKAFKQI

SEQ ID NO: 26240 - protein, 13 aa, Severe acute respiratory syndrome coronavirus 2
  REGION 1..13: note = Table B: HLA-DRB1*04:08L
NIGEQKSILSPLY

SEQ ID NO: 26241 - protein, 13 aa, Severe acute respiratory syndrome coronavirus 2
  REGION 1..13: note = Table B: HLA-DRB1*04:08L
VRSIFSRTLETAQ

SEQ ID NO: 26242 - protein, 13 aa, Severe acute respiratory syndrome coronavirus 2
  REGION 1..13: note = Table B: HLA-DRB1*04:08L
VYEKLKPVLDWLE

SEQ ID NO: 26243 - protein, 14 aa, Severe acute respiratory syndrome coronavirus 2
  REGION 1..14: note = Table B: HLA-DRB1*04:08L
FTLKGGAPTKVTFG

SEQ ID NO: 26244 - protein, 15 aa, Severe acute respiratory syndrome coronavirus 2
  REGION 1..15: note = Table B: HLA-DRB1*04:08L
ERIDKVLNEKCSAYT

SEQ ID NO: 26245 - protein, 13 aa, Severe acute respiratory syndrome coronavirus 2
  REGION 1..13: note = Table B: HLA-DRB1*04:08L
SGEFKLASHMYCS

SEQ ID NO: 26246 - protein, 14 aa, Severe acute respiratory syndrome coronavirus 2
  REGION 1..14: note = Table B: HLA-DRB1*04:08L
GKPLEFGATSAALQ

SEQ ID NO: 26247 - protein, 14 aa, Severe acute respiratory syndrome coronavirus 2
  REGION 1..14: note = Table B: HLA-DRB1*04:08L
TSAALQPEEEQEED

SEQ ID NO: 26248 - protein, 14 aa, Severe acute respiratory syndrome coronavirus 2
  REGION 1..14: note = Table B: HLA-DRB1*04:08L
IEVNSFSGYLKLTD

SEQ ID NO: 26249 - protein, 13 aa, Severe acute respiratory syndrome coronavirus 2
  REGION 1..13: note = Table B: HLA-DRB1*04:08L
AVFDKNLYDKLVS

SEQ ID NO: 26250 - protein, 13 aa, Severe acute respiratory syndrome coronavirus 2
  REGION 1..13: note = Table B: HLA-DRB1*04:08L
KNLYDKLVSSFLE

SEQ ID NO: 26251 - protein, 13 aa, Severe acute respiratory syndrome coronavirus 2
  REGION 1..13: note = Table B: HLA-DRB1*04:08L
TKFLTENLLLYID

SEQ ID NO: 26252 - protein, 12 aa, Severe acute respiratory syndrome coronavirus 2
  REGION 1..12: note = Table B: HLA-DRB1*04:08L
YIVGDVVQEGVL

SEQ ID NO: 26253 - protein, 11 aa, Severe acute respiratory syndrome coronavirus 2
  REGION 1..11: note = Table B: HLA-DRB1*04:08L
AIVSTIQRKYK

SEQ ID NO: 26254 - protein, 14 aa, Severe acute respiratory syndrome coronavirus 2
  REGION 1..14: note = Table B: HLA-DRB1*04:08L
STIQRKYKGIKIQE

SEQ ID NO: 26255 - protein, 15 aa, Severe acute respiratory syndrome coronavirus 2
  REGION 1..15: note = Table B: HLA-DRB1*04:08L
GVVDYGARFYFYTSK

SEQ ID NO: 26256 - protein, 13 aa, Severe acute respiratory syndrome coronavirus 2
  REGION 1..13: note = Table B: HLA-DRB1*04:08L
ETLVTMPLGYVTH

SEQ ID NO: 26257 - protein, 11 aa, Severe acute respiratory syndrome coronavirus 2
  REGION 1..11: note = Table B: HLA-DRB1*04:08L
SYLFQHANLDS

SEQ ID NO: 26258 - protein, 14 aa, Severe acute respiratory syndrome coronavirus 2
  REGION 1..14: note = Table B: HLA-DRB1*04:08L
KRVLNVVCKTCGQQ

SEQ ID NO: 26259 - protein, 16 aa, Severe acute respiratory syndrome coronavirus 2
  REGION 1..16: note = Table B: HLA-DRB1*04:08L
SSEYKGPITDVFYKEN

SEQ ID NO: 26260 - protein, 15 aa, Severe acute respiratory syndrome coronavirus 2
  REGION 1..15: note = Table B: HLA-DRB1*04:08L
IRCLWSTKPVETSNS

SEQ ID NO: 26261 - protein, 14 aa, Severe acute respiratory syndrome coronavirus 2
  REGION 1..14: note = Table B: HLA-DRB1*04:08L
KASMPTTIAKNTVK

SEQ ID NO: 26262 - protein, 11 aa, Severe acute respiratory syndrome coronavirus 2
  REGION 1..11: note = Table B: HLA-DRB1*04:08L
NYLKSPNFSKL

SEQ ID NO: 26263 - protein, 12 aa, Severe acute respiratory syndrome coronavirus 2
  REGION 1..12: note = Table B: HLA-DRB1*04:08L
YLKSPNFSKLIN

SEQ ID NO: 26264 - protein, 12 aa, Severe acute respiratory syndrome coronavirus 2
  REGION 1..12: note = Table B: HLA-DRB1*04:08L
SYFAVHFISNSW

SEQ ID NO: 26265 - protein, 13 aa, Severe acute respiratory syndrome coronavirus 2
  REGION 1..13: note = Table B: HLA-DRB1*04:08L
KSYVHVVDGCNSS

SEQ ID NO: 26266 - protein, 13 aa, Severe acute respiratory syndrome coronavirus 2
  REGION 1..13: note = Table B: HLA-DRB1*04:08L
TRVECTTIVNGVR

SEQ ID NO: 26267 - protein, 13 aa, Severe acute respiratory syndrome coronavirus 2
  REGION 1..13: note = Table B: HLA-DRB1*04:08L
EVARDLSLQFKRP

SEQ ID NO: 26268 - protein, 14 aa, Severe acute respiratory syndrome coronavirus 2
  REGION 1..14: note = Table B: HLA-DRB1*04:08L
GQKTYERHSLSHFV

SEQ ID NO: 26269 - protein, 13 aa, Severe acute respiratory syndrome coronavirus 2
  REGION 1..13: note = Table B: HLA-DRB1*04:08L
KTYERHSLSHFVN

SEQ ID NO: 26270 - protein, 15 aa, Severe acute respiratory syndrome coronavirus 2
  REGION 1..15: note = Table B: HLA-DRB1*04:08L
NAQVAKSHNIALIWN

SEQ ID NO: 26271 - protein, 16 aa, Severe acute respiratory syndrome coronavirus 2
  REGION 1..16: note = Table B: HLA-DRB1*04:08L
AQVAKSHNIALIWNVK

SEQ ID NO: 26272 - protein, 14 aa, Severe acute respiratory syndrome coronavirus 2
  REGION 1..14: note = Table B: HLA-DRB1*04:08L
ALKGGKIVNNWLKQ

SEQ ID NO: 26273 - protein, 11 aa, Severe acute respiratory syndrome coronavirus 2
  REGION 1..11: note = Table B: HLA-DRB1*04:08L
FYLITPVHVMS

SEQ ID NO: 26274 - protein, 14 aa, Severe acute respiratory syndrome coronavirus 2
  REGION 1..14: note = Table B: HLA-DRB1*04:08L
PVHVMSKHTDFSSE

SEQ ID NO: 26275 - protein, 12 aa, Severe acute respiratory syndrome coronavirus 2
  REGION 1..12: note = Table B: HLA-DRB1*04:08L
KAIDGGVTRDIA

SEQ ID NO: 26276 - protein, 13 aa, Severe acute respiratory syndrome coronavirus 2
  REGION 1..13: note = Table B: HLA-DRB1*04:08L
VGFVVPGLPGTIL

SEQ ID NO: 26277 - protein, 12 aa, Severe acute respiratory syndrome coronavirus 2
  REGION 1..12: note = Table B: HLA-DRB1*04:08L
FVVPGLPGTILR

SEQ ID NO: 26278 - protein, 15 aa, Severe acute respiratory syndrome coronavirus 2
  REGION 1..15: note = Table B: HLA-DRB1*04:08L
ILRTTNGDFLHFLPR

SEQ ID NO: 26279 - protein, 14 aa, Severe acute respiratory syndrome coronavirus 2
  REGION 1..14: note = Table B: HLA-DRB1*04:08L
PNTYLEGSVRVVTT

SEQ ID NO: 26280 - protein, 12 aa, Severe acute respiratory syndrome coronavirus 2
  REGION 1..12: note = Table B: HLA-DRB1*04:08L
DYYRSLPGVFCG

SEQ ID NO: 26281 - protein, 13 aa, Severe acute respiratory syndrome coronavirus 2
  REGION 1..13: note = Table B: HLA-DRB1*04:08L
SIVAGGIVAIVVT

SEQ ID NO: 26282 - protein, 12 aa, Severe acute respiratory syndrome coronavirus 2
  REGION 1..12: note = Table B: HLA-DRB1*04:08L
VLLPLTQYNRYL

SEQ ID NO: 26283 - protein, 12 aa, Severe acute respiratory syndrome coronavirus 2
  REGION 1..12: note = Table B: HLA-DRB1*04:08L
RYLALYNKYKYF

SEQ ID NO: 26284 - protein, 14 aa, Severe acute respiratory syndrome coronavirus 2
  REGION 1..14: note = Table B: HLA-DRB1*04:08L HLA-DQA1*02:01-B1*03:03L
REAACCHLAKALND

SEQ ID NO: 26285 - protein, 12 aa, Severe acute respiratory syndrome coronavirus 2
  REGION 1..12: note = Table B: HLA-DRB1*04:08L
PKYKFVRIQPGQ

SEQ ID NO: 26286 - protein, 14 aa, Severe acute respiratory syndrome coronavirus 2
  REGION 1..14: note = Table B: HLA-DRB1*04:08L
FCYMHHMELPTGVH

SEQ ID NO: 26287 - protein, 15 aa, Severe acute respiratory syndrome coronavirus 2
  REGION 1..15: note = Table B: HLA-DRB1*04:08L
VRQCSGVTFQSAVKR

SEQ ID NO: 26288 - protein, 14 aa, Severe acute respiratory syndrome coronavirus 2
  REGION 1..14: note = Table B: HLA-DRB1*04:08L
YDYLVSTQEFRYMN

SEQ ID NO: 26289 - protein, 14 aa, Severe acute respiratory syndrome coronavirus 2
  REGION 1..14: note = Table B: HLA-DRB1*04:08L
DYLVSTQEFRYMNS

SEQ ID NO: 26290 - protein, 15 aa, Severe acute respiratory syndrome coronavirus 2
  REGION 1..15: note = Table B: HLA-DRB1*04:08L
FPKSDGTGTIYTELE

SEQ ID NO: 26291 - protein, 13 aa, Severe acute respiratory syndrome coronavirus 2
  REGION 1..13: note = Table B: HLA-DRB1*04:08L
NNLNRGMVLGSLA

SEQ ID NO: 26292 - protein, 13 aa, Severe acute respiratory syndrome coronavirus 2
  REGION 1..13: note = Table B: HLA-DRB1*04:08L
SLAATVRLQAGNA

SEQ ID NO: 26293 - protein, 17 aa, Severe acute respiratory syndrome coronavirus 2
  REGION 1..17: note = Table B: HLA-DRB1*04:08L
NPKGFCDLKGKYVQIPT

SEQ ID NO: 26294 - protein, 14 aa, Severe acute respiratory syndrome coronavirus 2
  REGION 1..14: note = Table B: HLA-DRB1*04:08L
TPCGTGTSTDVVYR

SEQ ID NO: 26295 - protein, 15 aa, Severe acute respiratory syndrome coronavirus 2
  REGION 1..15: note = Table B: HLA-DRB1*04:08L
VRQALLKTVQFCDAM

SEQ ID NO: 26296 - protein, 13 aa, Severe acute respiratory syndrome coronavirus 2
  REGION 1..13: note = Table B: HLA-DRB1*04:08L HLA-DRB1*15:03L
FDRYFKYWDQTYH

SEQ ID NO: 26297 - protein, 15 aa, Severe acute respiratory syndrome coronavirus 2
  REGION 1..15: note = Table B: HLA-DRB1*04:08L
FNVLFSTVFPPTSFG

SEQ ID NO: 26298 - protein, 14 aa, Severe acute respiratory syndrome coronavirus 2
  REGION 1..14: note = Table B: HLA-DRB1*04:08L
STVFPPTSFGPLVR

SEQ ID NO: 26299 - protein, 13 aa, Severe acute respiratory syndrome coronavirus 2
  REGION 1..13: note = Table B: HLA-DRB1*04:08L
IFVDGVPFVVSTG

SEQ ID NO: 26300 - protein, 11 aa, Severe acute respiratory syndrome coronavirus 2
  REGION 1..11: note = Table B: HLA-DRB1*04:08L
PFVVSTGYHFR

SEQ ID NO: 26301 - protein, 12 aa, Severe acute respiratory syndrome coronavirus 2
  REGION 1..12: note = Table B: HLA-DRB1*04:08L
FYDFAVSKGFFK

SEQ ID NO: 26302 - protein, 14 aa, Severe acute respiratory syndrome coronavirus 2
  REGION 1..14: note = Table B: HLA-DRB1*04:08L
SSVELKHFFFAQDG

SEQ ID NO: 26303 - protein, 12 aa, Severe acute respiratory syndrome coronavirus 2
  REGION 1..12: note = Table B: HLA-DRB1*04:08L
AGFPFNKWGKAR

SEQ ID NO: 26304 - protein, 12 aa, Severe acute respiratory syndrome coronavirus 2
  REGION 1..12: note = Table B: HLA-DRB1*04:08L
MLRIMASLVLAR

SEQ ID NO: 26305 - protein, 11 aa, Severe acute respiratory syndrome coronavirus 2
  REGION 1..11: note = Table B: HLA-DRB1*04:08L
RFYRLANECAQ

SEQ ID NO: 26306 - protein, 14 aa, Severe acute respiratory syndrome coronavirus 2
  REGION 1..14: note = Table B: HLA-DRB1*04:08L
VRNLQHRLYECLYR

SEQ ID NO: 26307 - protein, 14 aa, Severe acute respiratory syndrome coronavirus 2
  REGION 1..14: note = Table B: HLA-DRB1*04:08L
RFVSLAIDAYPLTK

SEQ ID NO: 26308 - protein, 16 aa, Severe acute respiratory syndrome coronavirus 2
  REGION 1..16: note = Table B: HLA-DRB1*04:08L
VTQLYLGGMSYYCKSH

SEQ ID NO: 26309 - protein, 12 aa, Severe acute respiratory syndrome coronavirus 2
  REGION 1..12: note = Table B: HLA-DRB1*04:08L
SWEVGKPRPPLN

SEQ ID NO: 26310 - protein, 13 aa, Severe acute respiratory syndrome coronavirus 2
  REGION 1..13: note = Table B: HLA-DRB1*04:08L
RVTKNSKVQIGEY

SEQ ID NO: 26311 - protein, 15 aa, Severe acute respiratory syndrome coronavirus 2
  REGION 1..15: note = Table B: HLA-DRB1*04:08L
SKVQIGEYTFEKGDY

SEQ ID NO: 26312 - protein, 12 aa, Severe acute respiratory syndrome coronavirus 2
  REGION 1..12: note = Table B: HLA-DRB1*04:08L
AVVYRGTTTYKL

SEQ ID NO: 26313 - protein, 12 aa, Severe acute respiratory syndrome coronavirus 2
  REGION 1..12: note = Table B: HLA-DRB1*04:08L
GDPAQLPAPRTL

SEQ ID NO: 26314 - protein, 11 aa, Severe acute respiratory syndrome coronavirus 2
  REGION 1..11: note = Table B: HLA-DRB1*04:08L
KILGLPTQTVD

SEQ ID NO: 26315 - protein, 15 aa, Severe acute respiratory syndrome coronavirus 2
  REGION 1..15: note = Table B: HLA-DRB1*04:08L
GLHPTQAPTHLSVDT

SEQ ID NO: 26316 - protein, 12 aa, Severe acute respiratory syndrome coronavirus 2
  REGION 1..12: note = Table B: HLA-DRB1*04:08L
QFKHLIPLMYKG

SEQ ID NO: 26317 - protein, 12 aa, Severe acute respiratory syndrome coronavirus 2
  REGION 1..12: note = Table B: HLA-DRB1*04:08L
VFVLWAHGFELT

SEQ ID NO: 26318 - protein, 13 aa, Severe acute respiratory syndrome coronavirus 2
  REGION 1..13: note = Table B: HLA-DRB1*04:08L
HGFELTSMKYFVK

SEQ ID NO: 26319 - protein, 14 aa, Severe acute respiratory syndrome coronavirus 2
  REGION 1..14: note = Table B: HLA-DRB1*04:08L
DWTIEYPIIGDELK

SEQ ID NO: 26320 - protein, 13 aa, Severe acute respiratory syndrome coronavirus 2
  REGION 1..13: note = Table B: HLA-DRB1*04:08L
RVLSNLNLPGCDG

SEQ ID NO: 26321 - protein, 11 aa, Severe acute respiratory syndrome coronavirus 2
  REGION 1..11: note = Table B: HLA-DRB1*04:08L
AFDKSAFVNLK

SEQ ID NO: 26322 - protein, 13 aa, Severe acute respiratory syndrome coronavirus 2
  REGION 1..13: note = Table B: HLA-DRB1*04:08L
NVVNKGHFDGQQG

SEQ ID NO: 26323 - protein, 14 aa, Severe acute respiratory syndrome coronavirus 2
  REGION 1..14: note = Table B: HLA-DRB1*04:08L
PEVKILNNLGVDIA

SEQ ID NO: 26324 - protein, 13 aa, Severe acute respiratory syndrome coronavirus 2
  REGION 1..13: note = Table B: HLA-DRB1*04:08L
VKILNNLGVDIAA

SEQ ID NO: 26325 - protein, 13 aa, Severe acute respiratory syndrome coronavirus 2
  REGION 1..13: note = Table B: HLA-DRB1*04:08L
SVKGLQPSVGPKQ

SEQ ID NO: 26326 - protein, 14 aa, Severe acute respiratory syndrome coronavirus 2
  REGION 1..14: note = Table B: HLA-DRB1*04:08L
ASLNGVTLIGEAVK

SEQ ID NO: 26327 - protein, 14 aa, Severe acute respiratory syndrome coronavirus 2
  REGION 1..14: note = Table B: HLA-DRB1*04:08L
VVQQLPETYFTQSR

SEQ ID NO: 26328 - protein, 14 aa, Severe acute respiratory syndrome coronavirus 2
  REGION 1..14: note = Table B: HLA-DRB1*04:08L
LAMDEFIERYKLEG

SEQ ID NO: 26329 - protein, 12 aa, Severe acute respiratory syndrome coronavirus 2
  REGION 1..12: note = Table B: HLA-DRB1*04:08L
AFEHIVYGDFSH

SEQ ID NO: 26330 - protein, 16 aa, Severe acute respiratory syndrome coronavirus 2
  REGION 1..16: note = Table B: HLA-DRB1*04:08L
SHSQLGGLHLLIGLAK

SEQ ID NO: 26331 - protein, 13 aa, Severe acute respiratory syndrome coronavirus 2
  REGION 1..13: note = Table B: HLA-DRB1*04:08L
YTEISFMLWCKDG

SEQ ID NO: 26332 - protein, 13 aa, Severe acute respiratory syndrome coronavirus 2
  REGION 1..13: note = Table B: HLA-DRB1*04:08L
TEISFMLWCKDGH

SEQ ID NO: 26333 - protein, 14 aa, Severe acute respiratory syndrome coronavirus 2
  REGION 1..14: note = Table B: HLA-DRB1*04:08L
AGSDKGVAPGTAVL

SEQ ID NO: 26334 - protein, 11 aa, Severe acute respiratory syndrome coronavirus 2
  REGION 1..11: note = Table B: HLA-DRB1*04:08L
LIISDMYDPKT

SEQ ID NO: 26335 - protein, 12 aa, Severe acute respiratory syndrome coronavirus 2
  REGION 1..12: note = Table B: HLA-DRB1*04:08L
HSWNADLYKLMG

SEQ ID NO: 26336 - protein, 14 aa, Severe acute respiratory syndrome coronavirus 2
  REGION 1..14: note = Table B: HLA-DRB1*04:08L
NADLYKLMGHFAWW

SEQ ID NO: 26337 - protein, 13 aa, Severe acute respiratory syndrome coronavirus 2
  REGION 1..13: note = Table B: HLA-DRB1*04:08L
AWWTAFVTNVNAS

SEQ ID NO: 26338 - protein, 14 aa, Severe acute respiratory syndrome coronavirus 2
  REGION 1..14: note = Table B: HLA-DRB1*04:08L
LLSKGRLIIRENNR

SEQ ID NO: 26339 - protein, 13 aa, Severe acute respiratory syndrome coronavirus 2
  REGION 1..13: note = Table B: HLA-DRB1*04:08L
FTRGVYYPDKVFR

SEQ ID NO: 26340 - protein, 13 aa, Severe acute respiratory syndrome coronavirus 2
  REGION 1..13: note = Table B: HLA-DRB1*04:08L
SWMESEFRVYSSA

SEQ ID NO: 26341 - protein, 12 aa, Severe acute respiratory syndrome coronavirus 2
  REGION 1..12: note = Table B: HLA-DRB1*04:08L
NIDGYFKIYSKH

SEQ ID NO: 26342 - protein, 12 aa, Severe acute respiratory syndrome coronavirus 2
  REGION 1..12: note = Table B: HLA-DRB1*04:08L
IYSKHTPINLVR

SEQ ID NO: 26343 - protein, 13 aa, Severe acute respiratory syndrome coronavirus 2
  REGION 1..13: note = Table B: HLA-DRB1*04:08L
HRSYLTPGDSSSG

SEQ ID NO: 26344 - protein, 12 aa, Severe acute respiratory syndrome coronavirus 2
  REGION 1..12: note = Table B: HLA-DRB1*04:08L
GWTAGAAAYYVG

SEQ ID NO: 26345 - protein, 15 aa, Severe acute respiratory syndrome coronavirus 2
  REGION 1..15: note = Table B: HLA-DRB1*04:08L
AWNRKRISNCVADYS

SEQ ID NO: 26346 - protein, 11 aa, Severe acute respiratory syndrome coronavirus 2
  REGION 1..11: note = Table B: HLA-DRB1*04:08L
TFKCYGVSPTK

SEQ ID NO: 26347 - protein, 13 aa, Severe acute respiratory syndrome coronavirus 2
  REGION 1..13: note = Table B: HLA-DRB1*04:08L
RQIAPGQTGKIAD

SEQ ID NO: 26348 - protein, 14 aa, Severe acute respiratory syndrome coronavirus 2
  REGION 1..14: note = Table B: HLA-DRB1*04:08L
SYGFQPTNGVGYQP

SEQ ID NO: 26349 - protein, 14 aa, Severe acute respiratory syndrome coronavirus 2
  REGION 1..14: note = Table B: HLA-DRB1*04:08L
SVITPGTNTSNQVA

SEQ ID NO: 26350 - protein, 13 aa, Severe acute respiratory syndrome coronavirus 2
  REGION 1..13: note = Table B: HLA-DRB1*04:08L
VAIHADQLTPTWR

SEQ ID NO: 26351 - protein, 14 aa, Severe acute respiratory syndrome coronavirus 2
  REGION 1..14: note = Table B: HLA-DRB1*04:08L
RARSVASQSIIAYT

SEQ ID NO: 26352 - protein, 14 aa, Severe acute respiratory syndrome coronavirus 2
  REGION 1..14: note = Table B: HLA-DRB1*04:08L
VFAQVKQIYKTPPI

SEQ ID NO: 26353 - protein, 13 aa, Severe acute respiratory syndrome coronavirus 2
  REGION 1..13: note = Table B: HLA-DRB1*04:08L
VTLADAGFIKQYG

SEQ ID NO: 26354 - protein, 13 aa, Severe acute respiratory syndrome coronavirus 2
  REGION 1..13: note = Table B: HLA-DRB1*04:08L
QIPFAMQMAYRFN

SEQ ID NO: 26355 - protein, 12 aa, Severe acute respiratory syndrome coronavirus 2
  REGION 1..12: note = Table B: HLA-DRB1*04:08L
FNSAIGKIQDSL

SEQ ID NO: 26356 - protein, 14 aa, Severe acute respiratory syndrome coronavirus 2
  REGION 1..14: note = Table B: HLA-DRB1*04:08L
KIQDSLSSTASALG

SEQ ID NO: 26357 - protein, 15 aa, Severe acute respiratory syndrome coronavirus 2
  REGION 1..15: note = Table B: HLA-DRB1*04:08L
DKVEAEVQIDRLITG

SEQ ID NO: 26358 - protein, 12 aa, Severe acute respiratory syndrome coronavirus 2
  REGION 1..12: note = Table B: HLA-DRB1*04:08L
IDRLITGRLQSL

SEQ ID NO: 26359 - protein, 12 aa, Severe acute respiratory syndrome coronavirus 2
  REGION 1..12: note = Table B: HLA-DRB1*04:08L
QLIRAAEIRASA

SEQ ID NO: 26360 - protein, 14 aa, Severe acute respiratory syndrome coronavirus 2
  REGION 1..14: note = Table B: HLA-DRB1*04:08L
VFVSNGTHWFVTQR

SEQ ID NO: 26361 - protein, 14 aa, Severe acute respiratory syndrome coronavirus 2
  REGION 1..14: note = Table B: HLA-DRB1*04:08L
LNESLIDLQELGKY

SEQ ID NO: 26362 - protein, 12 aa, Severe acute respiratory syndrome coronavirus 2
  REGION 1..12: note = Table B: HLA-DRB1*04:08L
MRIFTIGTVTLK

SEQ ID NO: 26363 - protein, 12 aa, Severe acute respiratory syndrome coronavirus 2
  REGION 1..12: note = Table B: HLA-DRB1*04:08L
RIFTIGTVTLKQ

SEQ ID NO: 26364 - protein, 11 aa, Severe acute respiratory syndrome coronavirus 2
  REGION 1..11: note = Table B: HLA-DRB1*04:08L
FQSASKIITLK

SEQ ID NO: 26365 - protein, 15 aa, Severe acute respiratory syndrome coronavirus 2
  REGION 1..15: note = Table B: HLA-DRB1*04:08L
HTNCYDYCIPYNSVT

SEQ ID NO: 26366 - protein, 12 aa, Severe acute respiratory syndrome coronavirus 2
  REGION 1..12: note = Table B: HLA-DRB1*04:08L
SGDGTTSPISEH

SEQ ID NO: 26367 - protein, 16 aa, Severe acute respiratory syndrome coronavirus 2
  REGION 1..16: note = Table B: HLA-DRB1*04:08L
SPISEHDYQIGGYTEK

SEQ ID NO: 26368 - protein, 13 aa, Severe acute respiratory syndrome coronavirus 2
  REGION 1..13: note = Table B: HLA-DRB1*04:08L
HDYQIGGYTEKWE

SEQ ID NO: 26369 - protein, 15 aa, Severe acute respiratory syndrome coronavirus 2
  REGION 1..15: note = Table B: HLA-DRB1*04:08L
ESGVKDCVVLHSYFT

SEQ ID NO: 26370 - protein, 12 aa, Severe acute respiratory syndrome coronavirus 2
  REGION 1..12: note = Table B: HLA-DRB1*04:08L
SYFTSDYYQLYS

SEQ ID NO: 26371 - protein, 13 aa, Severe acute respiratory syndrome coronavirus 2
  REGION 1..13: note = Table B: HLA-DRB1*04:08L
HLRIAGHHLGRCD

SEQ ID NO: 26372 - protein, 15 aa, Severe acute respiratory syndrome coronavirus 2
  REGION 1..15: note = Table B: HLA-DRB1*04:08L
AGHHLGRCDIKDLPK

SEQ ID NO: 26373 - protein, 14 aa, Severe acute respiratory syndrome coronavirus 2
  REGION 1..14: note = Table B: HLA-DRB1*04:08L
PKEITVATSRTLSY

SEQ ID NO: 26374 - protein, 13 aa, Severe acute respiratory syndrome coronavirus 2
  REGION 1..13: note = Table B: HLA-DRB1*04:08L
EITVATSRTLSYY

SEQ ID NO: 26375 - protein, 15 aa, Severe acute respiratory syndrome coronavirus 2
  REGION 1..15: note = Table B: HLA-DRB1*04:08L
LRARSVSPKLFIRQE

SEQ ID NO: 26376 - protein, 13 aa, Severe acute respiratory syndrome coronavirus 2
  REGION 1..13: note = Table B: HLA-DRB1*04:08L
LFIRQEEVQELYS

SEQ ID NO: 26377 - protein, 14 aa, Severe acute respiratory syndrome coronavirus 2
  REGION 1..14: note = Table B: HLA-DRB1*04:08L
TTLPKGFYAEGSRG

SEQ ID NO: 26378 - protein, 15 aa, Severe acute respiratory syndrome coronavirus 2
  REGION 1..15: note = Table B: HLA-DRB1*04:08L
ESKMSGKGQQQQGQT

SEQ ID NO: 26379 - protein, 14 aa, Severe acute respiratory syndrome coronavirus 2
  REGION 1..14: note = Table B: HLA-DRB1*04:08L
VTKKSAAEASKKPR

SEQ ID NO: 26380 - protein, 14 aa, Severe acute respiratory syndrome coronavirus 2
  REGION 1..14: note = Table B: HLA-DRB1*04:08L
KKSAAEASKKPRQK

SEQ ID NO: 26381 - protein, 14 aa, Severe acute respiratory syndrome coronavirus 2
  REGION 1..14: note = Table B: HLA-DRB1*04:08L
KSAAEASKKPRQKR

SEQ ID NO: 26382 - protein, 14 aa, Severe acute respiratory syndrome coronavirus 2
  REGION 1..14: note = Table B: HLA-DRB1*04:08L
QKRTATKAYNVTQA

SEQ ID NO: 26383 - protein, 16 aa, Severe acute respiratory syndrome coronavirus 2
  REGION 1..16: note = Table B: HLA-DRB1*04:08L
DKKKKADETQALPQRQ

SEQ ID NO: 26384 - protein, 14 aa, Severe acute respiratory syndrome coronavirus 2
  REGION 1..14: note = Table B: HLA-DRB1*08:02L
AWYTERSEKSYELQ

SEQ ID NO: 26385 - protein, 14 aa, Severe acute respiratory syndrome coronavirus 2
  REGION 1..14: note = Table B: HLA-DRB1*08:02L
DAVIKTLQPVSELL

SEQ ID NO: 26386 - protein, 15 aa, Severe acute respiratory syndrome coronavirus 2
  REGION 1..15: note = Table B: HLA-DRB1*08:02L
EDDYQGKPLEFGATS

SEQ ID NO: 26387 - protein, 17 aa, Severe acute respiratory syndrome coronavirus 2
  REGION 1..17: note = Table B: HLA-DRB1*08:02L
VQPQLEMELTPVVQTIE

SEQ ID NO: 26388 - protein, 17 aa, Severe acute respiratory syndrome coronavirus 2
  REGION 1..17: note = Table B: HLA-DRB1*08:02L
VKPTVVVNAANVYLKHG

SEQ ID NO: 26389 - protein, 16 aa, Severe acute respiratory syndrome coronavirus 2
  REGION 1..16: note = Table B: HLA-DRB1*08:02L
VTTTLEETKFLTENLL

SEQ ID NO: 26390 - protein, 13 aa, Severe acute respiratory syndrome coronavirus 2
  REGION 1..13: note = Table B: HLA-DRB1*08:02L
FYFYTSKTTVASL

SEQ ID NO: 26391 - protein, 15 aa, Severe acute respiratory syndrome coronavirus 2
  REGION 1..15: note = Table B: HLA-DRB1*08:02L
DGEVITFDNLKTLLS

SEQ ID NO: 26392 - protein, 16 aa, Severe acute respiratory syndrome coronavirus 2
  REGION 1..16: note = Table B: HLA-DRB1*08:02L
YPQVNGLTSIKWADNN

SEQ ID NO: 26393 - protein, 14 aa, Severe acute respiratory syndrome coronavirus 2
  REGION 1..14: note = Table B: HLA-DRB1*08:02L
DLVPNQPYPNASFD

SEQ ID NO: 26394 - protein, 14 aa, Severe acute respiratory syndrome coronavirus 2
  REGION 1..14: note = Table B: HLA-DRB1*08:02L
SFDVLKSEDAQGMD

SEQ ID NO: 26395 - protein, 13 aa, Severe acute respiratory syndrome coronavirus 2
  REGION 1..13: note = Table B: HLA-DRB1*08:02L
AGSTFISDEVARD

SEQ ID NO: 26396 - protein, 16 aa, Severe acute respiratory syndrome coronavirus 2
  REGION 1..16: note = Table B: HLA-DRB1*08:02L
IIGYKAIDGGVTRDIA

SEQ ID NO: 26397 - protein, 13 aa, Severe acute respiratory syndrome coronavirus 2
  REGION 1..13: note = Table B: HLA-DRB1*08:02L
FGEYSHVVAFNTL

SEQ ID NO: 26398 - protein, 14 aa, Severe acute respiratory syndrome coronavirus 2
  REGION 1..14: note = Table B: HLA-DRB1*08:02L
LVYKVYYGNALDQA

SEQ ID NO: 26399 - protein, 16 aa, Severe acute respiratory syndrome coronavirus 2
  REGION 1..16: note = Table B: HLA-DRB1*08:02L
LSEISMDNSPNLAWPL

SEQ ID NO: 26400 - protein, 18 aa, Severe acute respiratory syndrome coronavirus 2
  REGION 1..18: note = Table B: HLA-DRB1*08:02L
DEDDNLIDSYFVVKRHTF

SEQ ID NO: 26401 - protein, 14 aa, Severe acute respiratory syndrome coronavirus 2
  REGION 1..14: note = Table B: HLA-DRB1*08:02L
ELLVYAADPAMHAA

SEQ ID NO: 26402 - protein, 15 aa, Severe acute respiratory syndrome coronavirus 2
  REGION 1..15: note = Table B: HLA-DRB1*08:02L
DDYVYLPYPDPSRIL

SEQ ID NO: 26403 - protein, 16 aa, Severe acute respiratory syndrome coronavirus 2
  REGION 1..16: note = Table B: HLA-DRB1*08:02L
NYVFTGYRVTKNSKVQ

SEQ ID NO: 26404 - protein, 15 aa, Severe acute respiratory syndrome coronavirus 2
  REGION 1..15: note = Table B: HLA-DRB1*08:02L
FTGYRVTKNSKVQIG

SEQ ID NO: 26405 - protein, 16 aa, Severe acute respiratory syndrome coronavirus 2
  REGION 1..16: note = Table B: HLA-DRB1*08:02L
TGYRVTKNSKVQIGEY

SEQ ID NO: 26406 - protein, 16 aa, Severe acute respiratory syndrome coronavirus 2
  REGION 1..16: note = Table B: HLA-DRB1*08:02L HLA-DRB1*08:03L
GYRVTKNSKVQIGEYT

SEQ ID NO: 26407 - protein, 15 aa, Severe acute respiratory syndrome coronavirus 2
  REGION 1..15: note = Table B: HLA-DRB1*08:02L
ITHDVSSAINRPQIG

SEQ ID NO: 26408 - protein, 15 aa, Severe acute respiratory syndrome coronavirus 2
  REGION 1..15: note = Table B: HLA-DRB1*08:02L
GDELKINAACRKVQH

SEQ ID NO: 26409 - protein, 18 aa, Severe acute respiratory syndrome coronavirus 2
  REGION 1..18: note = Table B: HLA-DRB1*08:02L
KVQHMVVKAALLADKFPV

SEQ ID NO: 26410 - protein, 17 aa, Severe acute respiratory syndrome coronavirus 2
  REGION 1..17: note = Table B: HLA-DRB1*08:02L
GLHLLIGLAKRFKESPF

SEQ ID NO: 26411 - protein, 18 aa, Severe acute respiratory syndrome coronavirus 2
  REGION 1..18: note = Table B: HLA-DRB1*08:02L
HVETFYPKLQSSQAWQPG

SEQ ID NO: 26412 - protein, 15 aa, Severe acute respiratory syndrome coronavirus 2
  REGION 1..15: note = Table B: HLA-DRB1*08:02L
SDMYDPKTKNVTKEN

SEQ ID NO: 26413 - protein, 17 aa, Severe acute respiratory syndrome coronavirus 2
  REGION 1..17: note = Table B: HLA-DRB1*08:02L
SEAFLIGCNYLGKPREQ

SEQ ID NO: 26414 - protein, 16 aa, Severe acute respiratory syndrome coronavirus 2
  REGION 1..16: note = Table B: HLA-DRB1*08:02L
KSWMESEFRVYSSANN

SEQ ID NO: 26415 - protein, 18 aa, Severe acute respiratory syndrome coronavirus 2
  REGION 1..18: note = Table B: HLA-DRB1*08:02L
LPIGINITRFQTLLALHR

SEQ ID NO: 26416 - protein, 14 aa, Severe acute respiratory syndrome coronavirus 2
  REGION 1..14: note = Table B: HLA-DRB1*08:02L
LKSFTVEKGIYQTS

SEQ ID NO: 26417 - protein, 15 aa, Severe acute respiratory syndrome coronavirus 2
  REGION 1..15: note = Table B: HLA-DRB1*08:02L
GGNYNYLYRLFRKSN

SEQ ID NO: 26418 - protein, 15 aa, Severe acute respiratory syndrome coronavirus 2
  REGION 1..15: note = Table B: HLA-DRB1*08:02L
VKQIYKTPPIKDFGG

SEQ ID NO: 26419 - protein, 13 aa, Severe acute respiratory syndrome coronavirus 2
  REGION 1..13: note = Table B: HLA-DRB1*08:02L
NFSQILPDPSKPS

SEQ ID NO: 26420 - protein, 15 aa, Severe acute respiratory syndrome coronavirus 2
  REGION 1..15: note = Table B: HLA-DRB1*08:02L
NTVYDPLQPELDSFK

SEQ ID NO: 26421 - protein, 13 aa, Severe acute respiratory syndrome coronavirus 2
  REGION 1..13: note = Table B: HLA-DRB1*08:02L
LAVFQSASKIITL

SEQ ID NO: 26422 - protein, 17 aa, Severe acute respiratory syndrome coronavirus 2
  REGION 1..17: note = Table B: HLA-DRB1*08:02L
GDQELIRQGTDYKHWPQ

SEQ ID NO: 26423 - protein, 13 aa, Severe acute respiratory syndrome coronavirus 2
  REGION 1..13: note = Table B: HLA-DRB1*08:03L
LLEILQKEKVNIN

SEQ ID NO: 26424 - protein, 12 aa, Severe acute respiratory syndrome coronavirus 2
  REGION 1..12: note = Table B: HLA-DRB1*08:03L
TVYEKLKPVLDW

SEQ ID NO: 26425 - protein, 15 aa, Severe acute respiratory syndrome coronavirus 2
  REGION 1..15: note = Table B: HLA-DRB1*08:03L
INGLMLLEIKDTEKY

SEQ ID NO: 26426 - protein, 15 aa, Severe acute respiratory syndrome coronavirus 2
  REGION 1..15: note = Table B: HLA-DRB1*08:03L
VQGYKSVNITFELDE

SEQ ID NO: 26427 - protein, 14 aa, Severe acute respiratory syndrome coronavirus 2
  REGION 1..14: note = Table B: HLA-DRB1*08:03L
QQIELKFNPPALQD

SEQ ID NO: 26428 - protein, 14 aa, Severe acute respiratory syndrome coronavirus 2
  REGION 1..14: note = Table B: HLA-DRB1*08:03L
QIELKFNPPALQDA

SEQ ID NO: 26429 - protein, 13 aa, Severe acute respiratory syndrome coronavirus 2
  REGION 1..13: note = Table B: HLA-DRB1*08:03L
NKTVGELGDVRET

SEQ ID NO: 26430 - protein, 13 aa, Severe acute respiratory syndrome coronavirus 2
  REGION 1..13: note = Table B: HLA-DRB1*08:03L
SDEVARDLSLQFK

SEQ ID NO: 26431 - protein, 15 aa, Severe acute respiratory syndrome coronavirus 2
  REGION 1..15: note = Table B: HLA-DRB1*08:03L
SIHLYFDKAGQKTYE

SEQ ID NO: 26432 - protein, 17 aa, Severe acute respiratory syndrome coronavirus 2
  REGION 1..17: note = Table B: HLA-DRB1*08:03L
TKDVVECLKLSHQSDIE

SEQ ID NO: 26433 - protein, 14 aa, Severe acute respiratory syndrome coronavirus 2
  REGION 1..14: note = Table B: HLA-DRB1*08:03L
TDTCFANKHADFDT

SEQ ID NO: 26434 - protein, 16 aa, Severe acute respiratory syndrome coronavirus 2
  REGION 1..16: note = Table B: HLA-DRB1*08:03L
DTCFANKHADFDTWFS

SEQ ID NO: 26435 - protein, 14 aa, Severe acute respiratory syndrome coronavirus 2
  REGION 1..14: note = Table B: HLA-DRB1*08:03L
FTMLRKLDNDALNN

SEQ ID NO: 26436 - protein, 15 aa, Severe acute respiratory syndrome coronavirus 2
  REGION 1..15: note = Table B: HLA-DRB1*08:03L
IAATRGATVVIGTSK

SEQ ID NO: 26437 - protein, 16 aa, Severe acute respiratory syndrome coronavirus 2
  REGION 1..16: note = Table B: HLA-DRB1*08:03L
GATVVIGTSKFYGGWH

SEQ ID NO: 26438 - protein, 16 aa, Severe acute respiratory syndrome coronavirus 2
  REGION 1..16: note = Table B: HLA-DRB1*08:03L
ATVVIGTSKFYGGWHN

SEQ ID NO: 26439 - protein, 17 aa, Severe acute respiratory syndrome coronavirus 2
  REGION 1..17: note = Table B: HLA-DRB1*08:03L
ATTAYANSVFNICQAVT

SEQ ID NO: 26440 - protein, 15 aa, Severe acute respiratory syndrome coronavirus 2
  REGION 1..15: note = Table B: HLA-DRB1*08:03L
ECLYRNRDVDTDFVN

SEQ ID NO: 26441 - protein, 15 aa, Severe acute respiratory syndrome coronavirus 2
  REGION 1..15: note = Table B: HLA-DRB1*08:03L
DVDTDFVNEFYAYLR

SEQ ID NO: 26442 - protein, 11 aa, Severe acute respiratory syndrome coronavirus 2
  REGION 1..11: note = Table B: HLA-DRB1*08:03L
YLQYIRKLHDE

SEQ ID NO: 26443 - protein, 15 aa, Severe acute respiratory syndrome coronavirus 2
  REGION 1..15: note = Table B: HLA-DRB1*08:03L
LEGYAFEHIVYGDFS

SEQ ID NO: 26444 - protein, 16 aa, Severe acute respiratory syndrome coronavirus 2
  REGION 1..16: note = Table B: HLA-DRB1*08:03L
VAIKITEHSWNADLYK

SEQ ID NO: 26445 - protein, 17 aa, Severe acute respiratory syndrome coronavirus 2
  REGION 1..17: note = Table B: HLA-DRB1*08:03L
GVYYHKNNKSWMESEFR

SEQ ID NO: 26446 - protein, 14 aa, Severe acute respiratory syndrome coronavirus 2
  REGION 1..14: note = Table B: HLA-DRB1*08:03L
VFNATRFASVYAWN

SEQ ID NO: 26447 - protein, 15 aa, Severe acute respiratory syndrome coronavirus 2
  REGION 1..15: note = Table B: HLA-DRB1*08:03L
GVLTESNKKFLPFQQ

SEQ ID NO: 26448 - protein, 13 aa, Severe acute respiratory syndrome coronavirus 2
  REGION 1..13: note = Table B: HLA-DRB1*08:03L
SYYKLGASQRVAG

SEQ ID NO: 26449 - protein, 16 aa, Severe acute respiratory syndrome coronavirus 2
  REGION 1..16: note = Table B: HLA-DRB1*08:03L
ASQRVAGDSGFAAYSR

SEQ ID NO: 26450 - protein, 11 aa, Severe acute respiratory syndrome coronavirus 2
  REGION 1..11: note = Table B: HLA-DQA1*02:01-B1*03:03L
SGETLGVLVPH

SEQ ID NO: 26451 - protein, 10 aa, Severe acute respiratory syndrome coronavirus 2
  REGION 1..10: note = Table B: HLA-DQA1*02:01-B1*03:03L
VFPLNSIIKT

SEQ ID NO: 26452 - protein, 12 aa, Severe acute respiratory syndrome coronavirus 2
  REGION 1..12: note = Table B: HLA-DQA1*02:01-B1*03:03L
GPEHSLAEYHNE

SEQ ID NO: 26453 - protein, 14 aa, Severe acute respiratory syndrome coronavirus 2
  REGION 1..14: note = Table B: HLA-DQA1*02:01-B1*03:03L
SEGLNDNLLEILQK

SEQ ID NO: 26454 - protein, 11 aa, Severe acute respiratory syndrome coronavirus 2
  REGION 1..11: note = Table B: HLA-DQA1*02:01-B1*03:03L HLA-DRB1*15:03L
NFKVTKGKAKK

SEQ ID NO: 26455 - protein, 11 aa, Severe acute respiratory syndrome coronavirus 2
  REGION 1..11: note = Table B: HLA-DQA1*02:01-B1*03:03L HLA-DRB1*15:03L
FKVTKGKAKKG

SEQ ID NO: 26456 - protein, 11 aa, Severe acute respiratory syndrome coronavirus 2
  REGION 1..11: note = Table B: HLA-DQA1*02:01-B1*03:03L
LEEKFKEGVEF

SEQ ID NO: 26457 - protein, 11 aa, Severe acute respiratory syndrome coronavirus 2
  REGION 1..11: note = Table B: HLA-DQA1*02:01-B1*03:03L
ALNLGETFVTH

SEQ ID NO: 26458 - protein, 11 aa, Severe acute respiratory syndrome coronavirus 2
  REGION 1..11: note = Table B: HLA-DQA1*02:01-B1*03:03L
TGLLMPLKAPK

SEQ ID NO: 26459 - protein, 13 aa, Severe acute respiratory syndrome coronavirus 2
  REGION 1..13: note = Table B: HLA-DQA1*02:01-B1*03:03L
SEAVEAPLVGTPV

SEQ ID NO: 26460 - protein, 11 aa, Severe acute respiratory syndrome coronavirus 2
  REGION 1..11: note = Table B: HLA-DQA1*02:01-B1*03:03L
EQKIAEIPKEE

SEQ ID NO: 26461 - protein, 14 aa, Severe acute respiratory syndrome coronavirus 2
  REGION 1..14: note = Table B: HLA-DQA1*02:01-B1*03:03L
RKVPTDNYITTYPG

SEQ ID NO: 26462 - protein, 13 aa, Severe acute respiratory syndrome coronavirus 2
  REGION 1..13: note = Table B: HLA-DQA1*02:01-B1*03:03L
RKYKGIKIQEGVV

SEQ ID NO: 26463 - protein, 15 aa, Severe acute respiratory syndrome coronavirus 2
  REGION 1..15: note = Table B: HLA-DQA1*02:01-B1*03:03L
LKRGDKSVYYTSNPT

SEQ ID NO: 26464 - protein, 10 aa, Severe acute respiratory syndrome coronavirus 2
  REGION 1..10: note = Table B: HLA-DQA1*02:01-B1*03:03L
PHNSHEGKTF

SEQ ID NO: 26465 - protein, 10 aa, Severe acute respiratory syndrome coronavirus 2
  REGION 1..10: note = Table B: HLA-DQA1*02:01-B1*03:03L
HNSHEGKTFY

SEQ ID NO: 26466 - protein, 10 aa, Severe acute respiratory syndrome coronavirus 2
  REGION 1..10: note = Table B: HLA-DQA1*02:01-B1*03:03L
MSALNHTKKW

SEQ ID NO: 26467 - protein, 12 aa, Severe acute respiratory syndrome coronavirus 2
  REGION 1..12: note = Table B: HLA-DQA1*02:01-B1*03:03L
SAPPAQYELKHG

SEQ ID NO: 26468 - protein, 12 aa, Severe acute respiratory syndrome coronavirus 2
  REGION 1..12: note = Table B: HLA-DQA1*02:01-B1*03:03L
TKSSEYKGPITD

SEQ ID NO: 26469 - protein, 10 aa, Severe acute respiratory syndrome coronavirus 2
  REGION 1..10: note = Table B: HLA-DQA1*02:01-B1*03:03L
GLAAVNSVPW

SEQ ID NO: 26470 - protein, 12 aa, Severe acute respiratory syndrome coronavirus 2
  REGION 1..12: note = Table B: HLA-DQA1*02:01-B1*03:03L
TTTNIVTRCLNR

SEQ ID NO: 26471 - protein, 10 aa, Severe acute respiratory syndrome coronavirus 2
  REGION 1..10: note = Table B: HLA-DQA1*02:01-B1*03:03L
KNTVKSVGKF

SEQ ID NO: 26472 - protein, 13 aa, Severe acute respiratory syndrome coronavirus 2
  REGION 1..13: note = Table B: HLA-DQA1*02:01-B1*03:03L
FDGKSKCEESSAK

SEQ ID NO: 26473 - protein, 16 aa, Severe acute respiratory syndrome coronavirus 2
  REGION 1..16: note = Table B: HLA-DQA1*02:01-B1*03:03L
DVETKDVVECLKLSHQ

SEQ ID NO: 26474 - protein, 12 aa, Severe acute respiratory syndrome coronavirus 2
  REGION 1..12: note = Table B: HLA-DQA1*02:01-B1*03:03L
DLGACIDCSARH

SEQ ID NO: 26475 - protein, 11 aa, Severe acute respiratory syndrome coronavirus 2
  REGION 1..11: note = Table B: HLA-DQA1*02:01-B1*03:03L
TRQVVNVVTTK

SEQ ID NO: 26476 - protein, 12 aa, Severe acute respiratory syndrome coronavirus 2
  REGION 1..12: note = Table B: HLA-DQA1*02:01-B1*03:03L
SQRGGSYTNDKA

SEQ ID NO: 26477 - protein, 10 aa, Severe acute respiratory syndrome coronavirus 2
  REGION 1..10: note = Table B: HLA-DQA1*02:01-B1*03:03L
PLIAAVITRE

SEQ ID NO: 26478 - protein, 12 aa, Severe acute respiratory syndrome coronavirus 2
  REGION 1..12: note = Table B: HLA-DQA1*02:01-B1*03:03L
REVGFVVPGLPG

SEQ ID NO: 26479 - protein, 11 aa, Severe acute respiratory syndrome coronavirus 2
  REGION 1..11: note = Table B: HLA-DQA1*02:01-B1*03:03L
DASGKPVPYCY

SEQ ID NO: 26480 - protein, 10 aa, Severe acute respiratory syndrome coronavirus 2
  REGION 1..10: note = Table B: HLA-DQA1*02:01-B1*03:03L
MRFRRAFGEY

SEQ ID NO: 26481 - protein, 13 aa, Severe acute respiratory syndrome coronavirus 2
  REGION 1..13: note = Table B: HLA-DQA1*02:01-B1*03:03L
TSEDMLNPNYEDL

SEQ ID NO: 26482 - protein, 11 aa, Severe acute respiratory syndrome coronavirus 2
  REGION 1..11: note = Table B: HLA-DQA1*02:01-B1*03:03L
NPNYEDLLIRK

SEQ ID NO: 26483 - protein, 11 aa, Severe acute respiratory syndrome coronavirus 2
  REGION 1..11: note = Table B: HLA-DQA1*02:01-B1*03:03L
MPASWVMRIMT

SEQ ID NO: 26484 - protein, 11 aa, Severe acute respiratory syndrome coronavirus 2
  REGION 1..11: note = Table B: HLA-DQA1*02:01-B1*03:03L
LLPPKNSIDAF

SEQ ID NO: 26485 - protein, 11 aa, Severe acute respiratory syndrome coronavirus 2
  REGION 1..11: note = Table B: HLA-DQA1*02:01-B1*03:03L
NSIDAFKLNIK

SEQ ID NO: 26486 - protein, 13 aa, Severe acute respiratory syndrome coronavirus 2
  REGION 1..13: note = Table B: HLA-DQA1*02:01-B1*03:03L
AIASEFSSLPSYA

SEQ ID NO: 26487 - protein, 13 aa, Severe acute respiratory syndrome coronavirus 2
  REGION 1..13: note = Table B: HLA-DQA1*02:01-B1*03:03L
SFLNRVCGVSAAR

SEQ ID NO: 26488 - protein, 15 aa, Severe acute respiratory syndrome coronavirus 2
  REGION 1..15: note = Table B: HLA-DQA1*02:01-B1*03:03L
ARLTPCGTGTSTDVV

SEQ ID NO: 26489 - protein, 16 aa, Severe acute respiratory syndrome coronavirus 2
  REGION 1..16: note = Table B: HLA-DQA1*02:01-B1*03:03L
VYALRHFDEGNCDTLK

SEQ ID NO: 26490 - protein, 15 aa, Severe acute respiratory syndrome coronavirus 2
  REGION 1..15: note = Table B: HLA-DQA1*02:01-B1*03:03L
ALRHFDEGNCDTLKE

SEQ ID NO: 26491 - protein, 11 aa, Severe acute respiratory syndrome coronavirus 2
  REGION 1..11: note = Table B: HLA-DQA1*02:01-B1*03:03L
FPPTSFGPLVR

SEQ ID NO: 26492 - protein, 10 aa, Severe acute respiratory syndrome coronavirus 2
  REGION 1..10: note = Table B: HLA-DQA1*02:01-B1*03:03L
VNLHSSRLSF

SEQ ID NO: 26493 - protein, 10 aa, Severe acute respiratory syndrome coronavirus 2
  REGION 1..10: note = Table B: HLA-DQA1*02:01-B1*03:03L
VKPGNFNKDF

SEQ ID NO: 26494 - protein, 13 aa, Severe acute respiratory syndrome coronavirus 2
  REGION 1..13: note = Table B: HLA-DQA1*02:01-B1*03:03L
VENPHLMGWDYPK

SEQ ID NO: 26495 - protein, 12 aa, Severe acute respiratory syndrome coronavirus 2
  REGION 1..12: note = Table B: HLA-DQA1*02:01-B1*03:03L
ADVFHLYLQYIR

SEQ ID NO: 26496 - protein, 10 aa, Severe acute respiratory syndrome coronavirus 2
  REGION 1..10: note = Table B: HLA-DQA1*02:01-B1*03:03L
NTSRYWEPEF

SEQ ID NO: 26497 - protein, 10 aa, Severe acute respiratory syndrome coronavirus 2
  REGION 1..10: note = Table B: HLA-DQA1*02:01-B1*03:03L
HVISTSHKLV

SEQ ID NO: 26498 - protein, 10 aa, Severe acute respiratory syndrome coronavirus 2
  REGION 1..10: note = Table B: HLA-DQA1*02:01-B1*03:03L
HKLVLSVNPY

SEQ ID NO: 26499 - protein, 11 aa, Severe acute respiratory syndrome coronavirus 2
  REGION 1..11: note = Table B: HLA-DQA1*02:01-B1*03:03L
FKLSYGIATVR

SEQ ID NO: 26500 - protein, 10 aa, Severe acute respiratory syndrome coronavirus 2
  REGION 1..10: note = Table B: HLA-DQA1*02:01-B1*03:03L
SKVQIGEYTF

SEQ ID NO: 26501 - protein, 11 aa, Severe acute respiratory syndrome coronavirus 2
  REGION 1..11: note = Table B: HLA-DQA1*02:01-B1*03:03L
LQGPPGTGKSH

SEQ ID NO: 26502 - protein, 11 aa, Severe acute respiratory syndrome coronavirus 2
  REGION 1..11: note = Table B: HLA-DQA1*02:01-B1*03:03L
SHAAVDALCEK

SEQ ID NO: 26503 - protein, 10 aa, Severe acute respiratory syndrome coronavirus 2
  REGION 1..10: note = Table B: HLA-DQA1*02:01-B1*03:03L
ARLRAKHYVY

SEQ ID NO: 26504 - protein, 13 aa, Severe acute respiratory syndrome coronavirus 2
  REGION 1..13: note = Table B: HLA-DQA1*02:01-B1*03:03L
NSVCRLMKTIGPD

SEQ ID NO: 26505 - protein, 11 aa, Severe acute respiratory syndrome coronavirus 2
  REGION 1..11: note = Table B: HLA-DQA1*02:01-B1*03:03L
PAEIVDTVSAL

SEQ ID NO: 26506 - protein, 10 aa, Severe acute respiratory syndrome coronavirus 2
  REGION 1..10: note = Table B: HLA-DQA1*02:01-B1*03:03L
RNPAWRKAVF

SEQ ID NO: 26507 - protein, 11 aa, Severe acute respiratory syndrome coronavirus 2
  REGION 1..11: note = Table B: HLA-DQA1*02:01-B1*03:03L
TAHSCNVNRFN

SEQ ID NO: 26508 - protein, 15 aa, Severe acute respiratory syndrome coronavirus 2
  REGION 1..15: note = Table B: HLA-DQA1*02:01-B1*03:03L
TRAKVGILCIMSDRD

SEQ ID NO: 26509 - protein, 15 aa, Severe acute respiratory syndrome coronavirus 2
  REGION 1..15: note = Table B: HLA-DQA1*02:01-B1*03:03L
FKTEGLCVDIPGIPK

SEQ ID NO: 26510 - protein, 11 aa, Severe acute respiratory syndrome coronavirus 2
  REGION 1..11: note = Table B: HLA-DQA1*02:01-B1*03:03L
VDTPNNTDFSR

SEQ ID NO: 26511 - protein, 10 aa, Severe acute respiratory syndrome coronavirus 2
  REGION 1..10: note = Table B: HLA-DQA1*02:01-B1*03:03L
LKNLSDRVVF

SEQ ID NO: 26512 - protein, 13 aa, Severe acute respiratory syndrome coronavirus 2
  REGION 1..13: note = Table B: HLA-DQA1*02:01-B1*03:03L
YPANSIVCRFDTR

SEQ ID NO: 26513 - protein, 10 aa, Severe acute respiratory syndrome coronavirus 2
  REGION 1..10: note = Table B: HLA-DQA1*02:01-B1*03:03L
AVCRHHANEY

SEQ ID NO: 26514 - protein, 11 aa, Severe acute respiratory syndrome coronavirus 2
  REGION 1..11: note = Table B: HLA-DQA1*02:01-B1*03:03L
QGEVPVSIINN

SEQ ID NO: 26515 - protein, 11 aa, Severe acute respiratory syndrome coronavirus 2
  REGION 1..11: note = Table B: HLA-DQA1*02:01-B1*03:03L
LQPSVGPKQAS

SEQ ID NO: 26516 - protein, 12 aa, Severe acute respiratory syndrome coronavirus 2
  REGION 1..12: note = Table B: HLA-DQA1*02:01-B1*03:03L
KKVDGVVQQLPE

SEQ ID NO: 26517 - protein, 12 aa, Severe acute respiratory syndrome coronavirus 2
  REGION 1..12: note = Table B: HLA-DQA1*02:01-B1*03:03L
TQSRNLQEFKPR

SEQ ID NO: 26518 - protein, 13 aa, Severe acute respiratory syndrome coronavirus 2
  REGION 1..13: note = Table B: HLA-DQA1*02:01-B1*03:03L
LLEKCDLQNYGDS

SEQ ID NO: 26519 - protein, 11 aa, Severe acute respiratory syndrome coronavirus 2
  REGION 1..11: note = Table B: HLA-DQA1*02:01-B1*03:03L
ATLPKGIMMNV

SEQ ID NO: 26520 - protein, 12 aa, Severe acute respiratory syndrome coronavirus 2
  REGION 1..12: note = Table B: HLA-DQA1*02:01-B1*03:03L
PKGIMMNVAKYT

SEQ ID NO: 26521 - protein, 10 aa, Severe acute respiratory syndrome coronavirus 2
  REGION 1..10: note = Table B: HLA-DQA1*02:01-B1*03:03L
TLAVPYNMRV

SEQ ID NO: 26522 - protein, 12 aa, Severe acute respiratory syndrome coronavirus 2
  REGION 1..12: note = Table B: HLA-DQA1*02:01-B1*03:03L
KENDSKEGFFTY

SEQ ID NO: 26523 - protein, 10 aa, Severe acute respiratory syndrome coronavirus 2
  REGION 1..10: note = Table B: HLA-DQA1*02:01-B1*03:03L
SFTRGVYYPD

SEQ ID NO: 26524 - protein, 11 aa, Severe acute respiratory syndrome coronavirus 2
  REGION 1..11: note = Table B: HLA-DQA1*02:01-B1*03:03L
IHVSGTNGTKR

SEQ ID NO: 26525 - protein, 10 aa, Severe acute respiratory syndrome coronavirus 2
  REGION 1..10: note = Table B: HLA-DQA1*02:01-B1*03:03L
VSGTNGTKRF

SEQ ID NO: 26526 - protein, 12 aa, Severe acute respiratory syndrome coronavirus 2
  REGION 1..12: note = Table B: HLA-DQA1*02:01-B1*03:03L HLA-DRB1*15:03L
TRFQTLLALHRS

SEQ ID NO: 26527 - protein, 11 aa, Severe acute respiratory syndrome coronavirus 2
  REGION 1..11: note = Table B: HLA-DQA1*02:01-B1*03:03L
TRFASVYAWNR

SEQ ID NO: 26528 - protein, 12 aa, Severe acute respiratory syndrome coronavirus 2
  REGION 1..12: note = Table B: HLA-DQA1*02:01-B1*03:03L
PVAIHADQLTPT

SEQ ID NO: 26529 - protein, 14 aa, Severe acute respiratory syndrome coronavirus 2
  REGION 1..14: note = Table B: HLA-DQA1*02:01-B1*03:03L
EHVNNSYECDIPIG

SEQ ID NO: 26530 - protein, 11 aa, Severe acute respiratory syndrome coronavirus 2
  REGION 1..11: note = Table B: HLA-DQA1*02:01-B1*03:03L
IGVTQNVLYEN

SEQ ID NO: 26531 - protein, 11 aa, Severe acute respiratory syndrome coronavirus 2
  REGION 1..11: note = Table B: HLA-DQA1*02:01-B1*03:03L
MSECVLGQSKR

SEQ ID NO: 26532 - protein, 11 aa, Severe acute respiratory syndrome coronavirus 2
  REGION 1..11: note = Table B: HLA-DQA1*02:01-B1*03:03L
RSMWSFNPETN

SEQ ID NO: 26533 - protein, 11 aa, Severe acute respiratory syndrome coronavirus 2
  REGION 1..11: note = Table B: HLA-DQA1*02:01-B1*03:03L
VPLHGTILTRP

SEQ ID NO: 26534 - protein, 10 aa, Severe acute respiratory syndrome coronavirus 2
  REGION 1..10: note = Table B: HLA-DQA1*02:01-B1*03:03L
AYSRYRIGNY

SEQ ID NO: 26535 - protein, 12 aa, Severe acute respiratory syndrome coronavirus 2
  REGION 1..12: note = Table B: HLA-DQA1*02:01-B1*03:03L
STGSNQNGERSG

SEQ ID NO: 26536 - protein, 10 aa, Severe acute respiratory syndrome coronavirus 2
  REGION 1..10: note = Table B: HLA-DQA1*02:01-B1*03:03L
GKMKDLSPRW

SEQ ID NO: 26537 - protein, 12 aa, Severe acute respiratory syndrome coronavirus 2
  REGION 1..12: note = Table B: HLA-DQA1*02:01-B1*03:03L
TLPKGFYAEGSR

SEQ ID NO: 26538 - protein, 12 aa, Severe acute respiratory syndrome coronavirus 2
  REGION 1..12: note = Table B: HLA-DQA1*02:01-B1*03:03L
LPKGFYAEGSRG

SEQ ID NO: 26539 - protein, 12 aa, Severe acute respiratory syndrome coronavirus 2
  REGION 1..12: note = Table B: HLA-DQA1*02:01-B1*03:03L
GSQASSRSSSRS

SEQ ID NO: 26540 - protein, 12 aa, Severe acute respiratory syndrome coronavirus 2
  REGION 1..12: note = Table B: HLA-DQA1*02:01-B1*03:03L
GTSPARMAGNGG

SEQ ID NO: 26541 - protein, 10 aa, Severe acute respiratory syndrome coronavirus 2
  REGION 1..10: note = Table B: HLA-DQA1*02:01-B1*03:03L
RTATKAYNVT

SEQ ID NO: 26542 - protein, 11 aa, Severe acute respiratory syndrome coronavirus 2
  REGION 1..11: note = Table B: HLA-DQA1*02:01-B1*03:03L
ATKAYNVTQAF

SEQ ID NO: 26543 - protein, 13 aa, Severe acute respiratory syndrome coronavirus 2
  REGION 1..13: note = Table B: HLA-DQA1*02:01-B1*03:03L
RGPEQTQGNFGDQ

SEQ ID NO: 26544 - protein, 10 aa, Severe acute respiratory syndrome coronavirus 2
  REGION 1..10: note = Table B: HLA-DQA1*02:01-B1*03:03L
IKLDDKDPNF

SEQ ID NO: 26545 - protein, 15 aa, Severe acute respiratory syndrome coronavirus 2
  REGION 1..15: note = Table B: HLA-DRB1*15:01L
ITGGVVQLTSQWLTN

SEQ ID NO: 26546 - protein, 15 aa, Severe acute respiratory syndrome coronavirus 2
  REGION 1..15: note = Table B: HLA-DRB1*15:01L
VKPTVVVNAANVYLK

SEQ ID NO: 26547 - protein, 16 aa, Severe acute respiratory syndrome coronavirus 2
  REGION 1..16: note = Table B: HLA-DRB1*15:01L
VAGALNKATNNAMQVE

SEQ ID NO: 26548 - protein, 15 aa, Severe acute respiratory syndrome coronavirus 2
  REGION 1..15: note = Table B: HLA-DRB1*15:01L
VSSFLEMKSEKQVEQ

SEQ ID NO: 26549 - protein, 14 aa, Severe acute respiratory syndrome coronavirus 2
  REGION 1..14: note = Table B: HLA-DRB1*15:01L
QLFFSYFAVHFISN

SEQ ID NO: 26550 - protein, 14 aa, Severe acute respiratory syndrome coronavirus 2
  REGION 1..14: note = Table B: HLA-DRB1*15:01L
EVAVKMFDAYVNTF

SEQ ID NO: 26551 - protein, 16 aa, Severe acute respiratory syndrome coronavirus 2
  REGION 1..16: note = Table B: HLA-DRB1*15:01L
VAAIFYLITPVHVMSK

SEQ ID NO: 26552 - protein, 15 aa, Severe acute respiratory syndrome coronavirus 2
  REGION 1..15: note = Table B: HLA-DRB1*15:01L
TPVYSFLPGVYSVIY

SEQ ID NO: 26553 - protein, 14 aa, Severe acute respiratory syndrome coronavirus 2
  REGION 1..14: note = Table B: HLA-DRB1*15:01L
SDVLLPLTQYNRYL

SEQ ID NO: 26554 - protein, 16 aa, Severe acute respiratory syndrome coronavirus 2
  REGION 1..16: note = Table B: HLA-DRB1*15:01L
VVLLILMTARTVYDDG

SEQ ID NO: 26555 - protein, 16 aa, Severe acute respiratory syndrome coronavirus 2
  REGION 1..16: note = Table B: HLA-DRB1*15:01L
AAKAYKDYLASGGQPI

SEQ ID NO: 26556 - protein, 15 aa, Severe acute respiratory syndrome coronavirus 2
  REGION 1..15: note = Table B: HLA-DRB1*15:01L
DFYDFAVSKGFFKEG

SEQ ID NO: 26557 - protein, 16 aa, Severe acute respiratory syndrome coronavirus 2
  REGION 1..16: note = Table B: HLA-DRB1*15:01L
YDYYRYNLPTMCDIRQ

SEQ ID NO: 26558 - protein, 13 aa, Severe acute respiratory syndrome coronavirus 2
  REGION 1..13: note = Table B: HLA-DRB1*15:01L
VASIKNFKSVLYY

SEQ ID NO: 26559 - protein, 16 aa, Severe acute respiratory syndrome coronavirus 2
  REGION 1..16: note = Table B: HLA-DRB1*15:01L
PAEIVDTVSALVYDNK

SEQ ID NO: 26560 - protein, 13 aa, Severe acute respiratory syndrome coronavirus 2
  REGION 1..13: note = Table B: HLA-DRB1*15:01L
ANEYRLYLDAYNM

SEQ ID NO: 26561 - protein, 16 aa, Severe acute respiratory syndrome coronavirus 2
  REGION 1..16: note = Table B: HLA-DRB1*15:01L
PVPEVKILNNLGVDIA

SEQ ID NO: 26562 - protein, 15 aa, Severe acute respiratory syndrome coronavirus 2
  REGION 1..15: note = Table B: HLA-DRB1*15:01L
DDFVEIIKSQDLSVV

SEQ ID NO: 26563 - protein, 14 aa, Severe acute respiratory syndrome coronavirus 2
  REGION 1..14: note = Table B: HLA-DRB1*15:01L
GAAAYYVGYLQPRT

SEQ ID NO: 26564 - protein, 15 aa, Severe acute respiratory syndrome coronavirus 2
  REGION 1..15: note = Table B: HLA-DRB1*15:01L
DYSVLYNSASFSTFK

SEQ ID NO: 26565 - protein, 13 aa, Severe acute respiratory syndrome coronavirus 2
  REGION 1..13: note = Table B: HLA-DRB1*15:01L
ASYQTQTNSPRRA

SEQ ID NO: 26566 - protein, 14 aa, Severe acute respiratory syndrome coronavirus 2
  REGION 1..14: note = Table B: HLA-DRB1*15:01L
DVVIGIVNNTVYDP

SEQ ID NO: 26567 - protein, 15 aa, Severe acute respiratory syndrome coronavirus 2
  REGION 1..15: note = Table B: HLA-DRB1*15:01L
VALLAVFQSASKIIT

SEQ ID NO: 26568 - protein, 15 aa, Severe acute respiratory syndrome coronavirus 2
  REGION 1..15: note = Table B: HLA-DRB1*15:01L
KHIDAYKTFPPTEPK

SEQ ID NO: 26569 - protein, 13 aa, Severe acute respiratory syndrome coronavirus 2
  REGION 1..13: note = Table B: HLA-DRB1*15:03L
SLVPGFNEKTHVQ

SEQ ID NO: 26570 - protein, 15 aa, Severe acute respiratory syndrome coronavirus 2
  REGION 1..15: note = Table B: HLA-DRB1*15:03L
QPYVFIKRSDARTAP

SEQ ID NO: 26571 - protein, 14 aa, Severe acute respiratory syndrome coronavirus 2
  REGION 1..14: note = Table B: HLA-DRB1*15:03L
HVMVELVAELEGIQ

SEQ ID NO: 26572 - protein, 16 aa, Severe acute respiratory syndrome coronavirus 2
  REGION 1..16: note = Table B: HLA-DRB1*15:03L
ADLKSFDLGDELGTDP

SEQ ID NO: 26573 - protein, 13 aa, Severe acute respiratory syndrome coronavirus 2
  REGION 1..13: note = Table B: HLA-DRB1*15:03L
KKKLDGFMGRIRS

SEQ ID NO: 26574 - protein, 12 aa, Severe acute respiratory syndrome coronavirus 2
  REGION 1..12: note = Table B: HLA-DRB1*15:03L
HSLAEYHNESGL

SEQ ID NO: 26575 - protein, 16 aa, Severe acute respiratory syndrome coronavirus 2
  REGION 1..16: note = Table B: HLA-DRB1*15:03L
VFSYVGCHNKCAYWVP

SEQ ID NO: 26576 - protein, 13 aa, Severe acute respiratory syndrome coronavirus 2
  REGION 1..13: note = Table B: HLA-DRB1*15:03L
EILQKEKVNINIV

SEQ ID NO: 26577 - protein, 11 aa, Severe acute respiratory syndrome coronavirus 2
  REGION 1..11: note = Table B: HLA-DRB1*15:03L
VNINIVGDFKL

SEQ ID NO: 26578 - protein, 11 aa, Severe acute respiratory syndrome coronavirus 2
  REGION 1..11: note = Table B: HLA-DRB1*15:03L
DFKLNEEIAII

SEQ ID NO: 26579 - protein, 12 aa, Severe acute respiratory syndrome coronavirus 2
  REGION 1..12: note = Table B: HLA-DRB1*15:03L
GISQYSLRLIDA

SEQ ID NO: 26580 - protein, 12 aa, Severe acute respiratory syndrome coronavirus 2
  REGION 1..12: note = Table B: HLA-DRB1*15:03L
EIVKFISTCACE

SEQ ID NO: 26581 - protein, 13 aa, Severe acute respiratory syndrome coronavirus 2
  REGION 1..13: note = Table B: HLA-DRB1*15:03L
KFLALCADSIIIG

SEQ ID NO: 26582 - protein, 12 aa, Severe acute respiratory syndrome coronavirus 2
  REGION 1..12: note = Table B: HLA-DRB1*15:03L
AKLKALNLGETF

SEQ ID NO: 26583 - protein, 12 aa, Severe acute respiratory syndrome coronavirus 2
  REGION 1..12: note = Table B: HLA-DRB1*15:03L
KEIIFLEGETLP

SEQ ID NO: 26584 - protein, 16 aa, Severe acute respiratory syndrome coronavirus 2
  REGION 1..16: note = Table B: HLA-DRB1*15:03L
TPVCINGLMLLEIKDT

SEQ ID NO: 26585 - protein, 12 aa, Severe acute respiratory syndrome coronavirus 2
  REGION 1..12: note = Table B: HLA-DRB1*15:03L
MVTNNTFTLKGG

SEQ ID NO: 26586 - protein, 11 aa, Severe acute respiratory syndrome coronavirus 2
  REGION 1..11: note = Table B: HLA-DRB1*15:03L
DEWSMATYYLF

SEQ ID NO: 26587 - protein, 15 aa, Severe acute respiratory syndrome coronavirus 2
  REGION 1..15: note = Table B: HLA-DRB1*15:03L
SAALQPEEEQEEDWL

SEQ ID NO: 26588 - protein, 12 aa, Severe acute respiratory syndrome coronavirus 2
  REGION 1..12: note = Table B: HLA-DRB1*15:03L
VYLKHGGGVAGA

SEQ ID NO: 26589 - protein, 12 aa, Severe acute respiratory syndrome coronavirus 2
  REGION 1..12: note = Table B: HLA-DRB1*15:03L
VLLAPLLSAGIF

SEQ ID NO: 26590 - protein, 14 aa, Severe acute respiratory syndrome coronavirus 2
  REGION 1..14: note = Table B: HLA-DRB1*15:03L
TVLKKCKSAFYILP

SEQ ID NO: 26591 - protein, 13 aa, Severe acute respiratory syndrome coronavirus 2
  REGION 1..13: note = Table B: HLA-DRB1*15:03L
ILPSIISNEKQEI

SEQ ID NO: 26592 - protein, 14 aa, Severe acute respiratory syndrome coronavirus 2
  REGION 1..14: note = Table B: HLA-DRB1*15:03L
WNLREMLAHAEETR

SEQ ID NO: 26593 - protein, 16 aa, Severe acute respiratory syndrome coronavirus 2
  REGION 1..16: note = Table B: HLA-DRB1*15:03L
TRKLMPVCVETKAIVS

SEQ ID NO: 26594 - protein, 12 aa, Severe acute respiratory syndrome coronavirus 2
  REGION 1..12: note = Table B: HLA-DRB1*15:03L
DAVTAYNGYLTS

SEQ ID NO: 26595 - protein, 13 aa, Severe acute respiratory syndrome coronavirus 2
  REGION 1..13: note = Table B: HLA-DRB1*15:03L
FLGRYMSALNHTK

SEQ ID NO: 26596 - protein, 12 aa, Severe acute respiratory syndrome coronavirus 2
  REGION 1..12: note = Table B: HLA-DRB1*15:03L
TLYCIDGALLTK

SEQ ID NO: 26597 - protein, 14 aa, Severe acute respiratory syndrome coronavirus 2
  REGION 1..14: note = Table B: HLA-DRB1*15:03L
LYCIDGALLTKSSE

SEQ ID NO: 26598 - protein, 14 aa, Severe acute respiratory syndrome coronavirus 2
  REGION 1..14: note = Table B: HLA-DRB1*15:03L
KPNELSRVLGLKTL

SEQ ID NO: 26599 - protein, 14 aa, Severe acute respiratory syndrome coronavirus 2
  REGION 1..14: note = Table B: HLA-DRB1*15:03L
NIVTRCLNRVCTNY

SEQ ID NO: 26600 - protein, 10 aa, Severe acute respiratory syndrome coronavirus 2
  REGION 1..10: note = Table B: HLA-DRB1*15:03L
SKLINIIIWF

SEQ ID NO: 26601 - protein, 14 aa, Severe acute respiratory syndrome coronavirus 2
  REGION 1..14: note = Table B: HLA-DRB1*15:03L
MPSYCTGYREGYLN

SEQ ID NO: 26602 - protein, 11 aa, Severe acute respiratory syndrome coronavirus 2
  REGION 1..11: note = Table B: HLA-DRB1*15:03L
RMYIFFASFYY

SEQ ID NO: 26603 - protein, 12 aa, Severe acute respiratory syndrome coronavirus 2
  REGION 1..12: note = Table B: HLA-DRB1*15:03L
YIFFASFYYVWK

SEQ ID NO: 26604 - protein, 13 aa, Severe acute respiratory syndrome coronavirus 2
  REGION 1..13: note = Table B: HLA-DRB1*15:03L
IFFASFYYVWKSY

SEQ ID NO: 26605 - protein, 14 aa, Severe acute respiratory syndrome coronavirus 2
  REGION 1..14: note = Table B: HLA-DRB1*15:03L
VHVVDGCNSSTCMM

SEQ ID NO: 26606 - protein, 15 aa, Severe acute respiratory syndrome coronavirus 2
  REGION 1..15: note = Table B: HLA-DRB1*15:03L
GFCKLHNWNCVNCDT

SEQ ID NO: 26607 - protein, 14 aa, Severe acute respiratory syndrome coronavirus 2
  REGION 1..14: note = Table B: HLA-DRB1*15:03L
SLQFKRPINPTDQS

SEQ ID NO: 26608 - protein, 12 aa, Severe acute respiratory syndrome coronavirus 2
  REGION 1..12: note = Table B: HLA-DRB1*15:03L
TLVATAEAELAK

SEQ ID NO: 26609 - protein, 14 aa, Severe acute respiratory syndrome coronavirus 2
  REGION 1..14: note = Table B: HLA-DRB1*15:03L
RQGFVDSDVETKDV

SEQ ID NO: 26610 - protein, 15 aa, Severe acute respiratory syndrome coronavirus 2
  REGION 1..15: note = Table B: HLA-DRB1*15:03L
GDSCNNYMLTYNKVE

SEQ ID NO: 26611 - protein, 10 aa, Severe acute respiratory syndrome coronavirus 2
  REGION 1..10: note = Table B: HLA-DRB1*15:03L
ALIWNVKDFM

SEQ ID NO: 26612 - protein, 10 aa, Severe acute respiratory syndrome coronavirus 2
  REGION 1..10: note = Table B: HLA-DRB1*15:03L
QLIKVTLVFL

SEQ ID NO: 26613 - protein, 11 aa, Severe acute respiratory syndrome coronavirus 2
  REGION 1..11: note = Table B: HLA-DRB1*15:03L
EIIGYKAIDGG

SEQ ID NO: 26614 - protein, 17 aa, Severe acute respiratory syndrome coronavirus 2
  REGION 1..17: note = Table B: HLA-DRB1*15:03L
DIASTDTCFANKHADFD

SEQ ID NO: 26615 - protein, 10 aa, Severe acute respiratory syndrome coronavirus 2
  REGION 1..10: note = Table B: HLA-DRB1*15:03L
SYTNDKACPL

SEQ ID NO: 26616 - protein, 15 aa, Severe acute respiratory syndrome coronavirus 2
  REGION 1..15: note = Table B: HLA-DRB1*15:03L
NDKACPLIAAVITRE

SEQ ID NO: 26617 - protein, 13 aa, Severe acute respiratory syndrome coronavirus 2
  REGION 1..13: note = Table B: HLA-DRB1*15:03L
AVGNICYTPSKLI

SEQ ID NO: 26618 - protein, 12 aa, Severe acute respiratory syndrome coronavirus 2
  REGION 1..12: note = Table B: HLA-DRB1*15:03L
VNLLTNMFTPLI

SEQ ID NO: 26619 - protein, 13 aa, Severe acute respiratory syndrome coronavirus 2
  REGION 1..13: note = Table B: HLA-DRB1*15:03L
GIVAIVVTCLAYY

SEQ ID NO: 26620 - protein, 10 aa, Severe acute respiratory syndrome coronavirus 2
  REGION 1..10: note = Table B: HLA-DRB1*15:03L
VVAFNTLLFL

SEQ ID NO: 26621 - protein, 14 aa, Severe acute respiratory syndrome coronavirus 2
  REGION 1..14: note = Table B: HLA-DRB1*15:03L
SVIYLYLTFYLTND

SEQ ID NO: 26622 - protein, 11 aa, Severe acute respiratory syndrome coronavirus 2
  REGION 1..11: note = Table B: HLA-DRB1*15:03L
LTNDVSFLAHI

SEQ ID NO: 26623 - protein, 12 aa, Severe acute respiratory syndrome coronavirus 2
  REGION 1..12: note = Table B: HLA-DRB1*15:03L
WFFSNYLKRRVV

SEQ ID NO: 26624 - protein, 12 aa, Severe acute respiratory syndrome coronavirus 2
  REGION 1..12: note = Table B: HLA-DRB1*15:03L
ALCTFLLNKEMY

SEQ ID NO: 26625 - protein, 16 aa, Severe acute respiratory syndrome coronavirus 2
  REGION 1..16: note = Table B: HLA-DRB1*15:03L
VSFCYMHHMELPTGVH

SEQ ID NO: 26626 - protein, 12 aa, Severe acute respiratory syndrome coronavirus 2
  REGION 1..12: note = Table B: HLA-DRB1*15:03L
NVLAWLYAAVIN

SEQ ID NO: 26627 - protein, 14 aa, Severe acute respiratory syndrome coronavirus 2
  REGION 1..14: note = Table B: HLA-DRB1*15:03L
LKELLQNGMNGRTI

SEQ ID NO: 26628 - protein, 14 aa, Severe acute respiratory syndrome coronavirus 2
  REGION 1..14: note = Table B: HLA-DRB1*15:03L
IAMSAFAMMFVKHK

SEQ ID NO: 26629 - protein, 13 aa, Severe acute respiratory syndrome coronavirus 2
  REGION 1..13: note = Table B: HLA-DRB1*15:03L
LKDCVMYASAVVL

SEQ ID NO: 26630 - protein, 10 aa, Severe acute respiratory syndrome coronavirus 2
  REGION 1..10: note = Table B: HLA-DRB1*15:03L
VMYASAVVLL

SEQ ID NO: 26631 - protein, 11 aa, Severe acute respiratory syndrome coronavirus 2
  REGION 1..11: note = Table B: HLA-DRB1*15:03L
CPIFFITGNTL

SEQ ID NO: 26632 - protein, 12 aa, Severe acute respiratory syndrome coronavirus 2
  REGION 1..12: note = Table B: HLA-DRB1*15:03L
FGLFCLLNRYFR

SEQ ID NO: 26633 - protein, 15 aa, Severe acute respiratory syndrome coronavirus 2
  REGION 1..15: note = Table B: HLA-DRB1*15:03L
GKPCIKVATVQSKMS

SEQ ID NO: 26634 - protein, 12 aa, Severe acute respiratory syndrome coronavirus 2
  REGION 1..12: note = Table B: HLA-DRB1*15:03L
LLSMQGAVDINK

SEQ ID NO: 26635 - protein, 12 aa, Severe acute respiratory syndrome coronavirus 2
  REGION 1..12: note = Table B: HLA-DRB1*15:03L
AVDINKLCEEML

SEQ ID NO: 26636 - protein, 12 aa, Severe acute respiratory syndrome coronavirus 2
  REGION 1..12: note = Table B: HLA-DRB1*15:03L
VDINKLCEEMLD

SEQ ID NO: 26637 - protein, 12 aa, Severe acute respiratory syndrome coronavirus 2
  REGION 1..12: note = Table B: HLA-DRB1*15:03L
MYKQARSEDKRA

SEQ ID NO: 26638 - protein, 14 aa, Severe acute respiratory syndrome coronavirus 2
  REGION 1..14: note = Table B: HLA-DRB1*15:03L
AMQTMLFTMLRKLD

SEQ ID NO: 26639 - protein, 14 aa, Severe acute respiratory syndrome coronavirus 2
  REGION 1..14: note = Table B: HLA-DRB1*15:03L
PDYNTYKNTCDGTT

SEQ ID NO: 26640 - protein, 12 aa, Severe acute respiratory syndrome coronavirus 2
  REGION 1..12: note = Table B: HLA-DRB1*15:03L
VLGSLAATVRLQ

SEQ ID NO: 26641 - protein, 13 aa, Severe acute respiratory syndrome coronavirus 2
  REGION 1..13: note = Table B: HLA-DRB1*15:03L
NSTVLSFCAFAVD

SEQ ID NO: 26642 - protein, 13 aa, Severe acute respiratory syndrome coronavirus 2
  REGION 1..13: note = Table B: HLA-DRB1*15:03L
STVLSFCAFAVDA

SEQ ID NO: 26643 - protein, 12 aa, Severe acute respiratory syndrome coronavirus 2
  REGION 1..12: note = Table B: HLA-DRB1*15:03L
RLTKYTMADLVY

SEQ ID NO: 26644 - protein, 14 aa, Severe acute respiratory syndrome coronavirus 2
  REGION 1..14: note = Table B: HLA-DRB1*15:03L
PVVDSYYSLLMPIL

SEQ ID NO: 26645 - protein, 15 aa, Severe acute respiratory syndrome coronavirus 2
  REGION 1..15: note = Table B: HLA-DRB1*15:03L
TRALTAESHVDTDLT

SEQ ID NO: 26646 - protein, 16 aa, Severe acute respiratory syndrome coronavirus 2
  REGION 1..16: note = Table B: HLA-DRB1*15:03L
VDTDLTKPYIKWDLLK

SEQ ID NO: 26647 - protein, 14 aa, Severe acute respiratory syndrome coronavirus 2
  REGION 1..14: note = Table B: HLA-DRB1*15:03L
KYDFTEERLKLFDR

SEQ ID NO: 26648 - protein, 12 aa, Severe acute respiratory syndrome coronavirus 2
  REGION 1..12: note = Table B: HLA-DRB1*15:03L
FVVSTGYHFREL

SEQ ID NO: 26649 - protein, 15 aa, Severe acute respiratory syndrome coronavirus 2
  REGION 1..15: note = Table B: HLA-DRB1*15:03L
LPTMCDIRQLLFVVE

SEQ ID NO: 26650 - protein, 14 aa, Severe acute respiratory syndrome coronavirus 2
  REGION 1..14: note = Table B: HLA-DRB1*15:03L
DGGCINANQVIVNN

SEQ ID NO: 26651 - protein, 13 aa, Severe acute respiratory syndrome coronavirus 2
  REGION 1..13: note = Table B: HLA-DRB1*15:03L
SKFYGGWHNMLKT

SEQ ID NO: 26652 - protein, 14 aa, Severe acute respiratory syndrome coronavirus 2
  REGION 1..14: note = Table B: HLA-DRB1*15:03L
KFYGGWHNMLKTVY

SEQ ID NO: 26653 - protein, 14 aa, Severe acute respiratory syndrome coronavirus 2
  REGION 1..14: note = Table B: HLA-DRB1*15:03L
GGWHNMLKTVYSDV

SEQ ID NO: 26654 - protein, 14 aa, Severe acute respiratory syndrome coronavirus 2
  REGION 1..14: note = Table B: HLA-DRB1*15:03L
PHLMGWDYPKCDRA

SEQ ID NO: 26655 - protein, 13 aa, Severe acute respiratory syndrome coronavirus 2
  REGION 1..13: note = Table B: HLA-DRB1*15:03L
VLSEMVMCGGSLY

SEQ ID NO: 26656 - protein, 15 aa, Severe acute respiratory syndrome coronavirus 2
  REGION 1..15: note = Table B: HLA-DRB1*15:03L
RLYECLYRNRDVDTD

SEQ ID NO: 26657 - protein, 10 aa, Severe acute respiratory syndrome coronavirus 2
  REGION 1..10: note = Table B: HLA-DRB1*15:03L
IKNFKSVLYY

SEQ ID NO: 26658 - protein, 16 aa, Severe acute respiratory syndrome coronavirus 2
  REGION 1..16: note = Table B: HLA-DRB1*15:03L
YQNNVFMSEAKCWTET

SEQ ID NO: 26659 - protein, 16 aa, Severe acute respiratory syndrome coronavirus 2
  REGION 1..16: note = Table B: HLA-DRB1*15:03L
HEFCSQHTMLVKQGDD

SEQ ID NO: 26660 - protein, 14 aa, Severe acute respiratory syndrome coronavirus 2
  REGION 1..14: note = Table B: HLA-DRB1*15:03L
KLVLSVNPYVCNAP

SEQ ID NO: 26661 - protein, 11 aa, Severe acute respiratory syndrome coronavirus 2
  REGION 1..11: note = Table B: HLA-DRB1*15:03L
VFGLYKNTCVG

SEQ ID NO: 26662 - protein, 12 aa, Severe acute respiratory syndrome coronavirus 2
  REGION 1..12: note = Table B: HLA-DRB1*15:03L
FGLYKNTCVGSD

SEQ ID NO: 26663 - protein, 16 aa, Severe acute respiratory syndrome coronavirus 2
  REGION 1..16: note = Table B: HLA-DRB1*15:03L
VTDFNAIATCDWTNAG

SEQ ID NO: 26664 - protein, 11 aa, Severe acute respiratory syndrome coronavirus 2
  REGION 1..11: note = Table B: HLA-DRB1*15:03L
YILANTCTERL

SEQ ID NO: 26665 - protein, 16 aa, Severe acute respiratory syndrome coronavirus 2
  REGION 1..16: note = Table B: HLA-DRB1*15:03L
SDRELHLSWEVGKPRP

SEQ ID NO: 26666 - protein, 12 aa, Severe acute respiratory syndrome coronavirus 2
  REGION 1..12: note = Table B: HLA-DRB1*15:03L
YTFEKGDYGDAV

SEQ ID NO: 26667 - protein, 12 aa, Severe acute respiratory syndrome coronavirus 2
  REGION 1..12: note = Table B: HLA-DRB1*15:03L
IGVVREFLTRNP

SEQ ID NO: 26668 - protein, 13 aa, Severe acute respiratory syndrome coronavirus 2
  REGION 1..13: note = Table B: HLA-DRB1*15:03L
FLTRNPAWRKAVF

SEQ ID NO: 26669 - protein, 16 aa, Severe acute respiratory syndrome coronavirus 2
  REGION 1..16: note = Table B: HLA-DRB1*15:03L
SQNAVASKILGLPTQT

SEQ ID NO: 26670 - protein, 11 aa, Severe acute respiratory syndrome coronavirus 2
  REGION 1..11: note = Table B: HLA-DRB1*15:03L
QVNGYPNMFIT

SEQ ID NO: 26671 - protein, 11 aa, Severe acute respiratory syndrome coronavirus 2
  REGION 1..11: note = Table B: HLA-DRB1*15:03L
MFITREEAIRH

SEQ ID NO: 26672 - protein, 14 aa, Severe acute respiratory syndrome coronavirus 2
  REGION 1..14: note = Table B: HLA-DRB1*15:03L
DTYACWHHSIGFDY

SEQ ID NO: 26673 - protein, 15 aa, Severe acute respiratory syndrome coronavirus 2
  REGION 1..15: note = Table B: HLA-DRB1*15:03L
NHDLYCQVHGNAHVA

SEQ ID NO: 26674 - protein, 14 aa, Severe acute respiratory syndrome coronavirus 2
  REGION 1..14: note = Table B: HLA-DRB1*15:03L
HMVVKAALLADKFP

SEQ ID NO: 26675 - protein, 13 aa, Severe acute respiratory syndrome coronavirus 2
  REGION 1..13: note = Table B: HLA-DRB1*15:03L
ADVEWKFYDAQPC

SEQ ID NO: 26676 - protein, 12 aa, Severe acute respiratory syndrome coronavirus 2
  REGION 1..12: note = Table B: HLA-DRB1*15:03L
KFYDAQPCSDKA

SEQ ID NO: 26677 - protein, 13 aa, Severe acute respiratory syndrome coronavirus 2
  REGION 1..13: note = Table B: HLA-DRB1*15:03L
TRVLSNLNLPGCD

SEQ ID NO: 26678 - protein, 12 aa, Severe acute respiratory syndrome coronavirus 2
  REGION 1..12: note = Table B: HLA-DRB1*15:03L
PFFYYSDSPCES

SEQ ID NO: 26679 - protein, 11 aa, Severe acute respiratory syndrome coronavirus 2
  REGION 1..11: note = Table B: HLA-DRB1*15:03L
EYRLYLDAYNM

SEQ ID NO: 26680 - protein, 10 aa, Severe acute respiratory syndrome coronavirus 2
  REGION 1..10: note = Table B: HLA-DRB1*15:03L
IKPVPEVKIL

SEQ ID NO: 26681 - protein, 13 aa, Severe acute respiratory syndrome coronavirus 2
  REGION 1..13: note = Table B: HLA-DRB1*15:03L
NLGVDIAANTVIW

SEQ ID NO: 26682 - protein, 14 aa, Severe acute respiratory syndrome coronavirus 2
  REGION 1..14: note = Table B: HLA-DRB1*15:03L
IGVCSMTDIAKKPT

SEQ ID NO: 26683 - protein, 12 aa, Severe acute respiratory syndrome coronavirus 2
  REGION 1..12: note = Table B: HLA-DRB1*15:03L
PLTVFFDGRVDG

SEQ ID NO: 26684 - protein, 16 aa, Severe acute respiratory syndrome coronavirus 2
  REGION 1..16: note = Table B: HLA-DRB1*15:03L
VGPKQASLNGVTLIGE

SEQ ID NO: 26685 - protein, 13 aa, Severe acute respiratory syndrome coronavirus 2
  REGION 1..13: note = Table B: HLA-DRB1*15:03L
LNGVTLIGEAVKT

SEQ ID NO: 26686 - protein, 14 aa, Severe acute respiratory syndrome coronavirus 2
  REGION 1..14: note = Table B: HLA-DRB1*15:03L
EFKPRSQMEIDFLE

SEQ ID NO: 26687 - protein, 12 aa, Severe acute respiratory syndrome coronavirus 2
  REGION 1..12: note = Table B: HLA-DRB1*15:03L
FIERYKLEGYAF

SEQ ID NO: 26688 - protein, 13 aa, Severe acute respiratory syndrome coronavirus 2
  REGION 1..13: note = Table B: HLA-DRB1*15:03L
KDGHVETFYPKLQ

SEQ ID NO: 26689 - protein, 13 aa, Severe acute respiratory syndrome coronavirus 2
  REGION 1..13: note = Table B: HLA-DRB1*15:03L
TQLCQYLNTLTLA

SEQ ID NO: 26690 - protein, 12 aa, Severe acute respiratory syndrome coronavirus 2
  REGION 1..12: note = Table B: HLA-DRB1*15:03L
ANKWDLIISDMY

SEQ ID NO: 26691 - protein, 13 aa, Severe acute respiratory syndrome coronavirus 2
  REGION 1..13: note = Table B: HLA-DRB1*15:03L
EGFFTYICGFIQQ

SEQ ID NO: 26692 - protein, 14 aa, Severe acute respiratory syndrome coronavirus 2
  REGION 1..14: note = Table B: HLA-DRB1*15:03L
AFLIGCNYLGKPRE

SEQ ID NO: 26693 - protein, 12 aa, Severe acute respiratory syndrome coronavirus 2
  REGION 1..12: note = Table B: HLA-DRB1*15:03L
LLPLVSSQCVNL

SEQ ID NO: 26694 - protein, 12 aa, Severe acute respiratory syndrome coronavirus 2
  REGION 1..12: note = Table B: HLA-DRB1*15:03L
FSNVTWFHAIHV

SEQ ID NO: 26695 - protein, 16 aa, Severe acute respiratory syndrome coronavirus 2
  REGION 1..16: note = Table B: HLA-DRB1*15:03L
AIHVSGTNGTKRFDNP

SEQ ID NO: 26696 - protein, 12 aa, Severe acute respiratory syndrome coronavirus 2
  REGION 1..12: note = Table B: HLA-DRB1*15:03L
VFKNIDGYFKIY

SEQ ID NO: 26697 - protein, 16 aa, Severe acute respiratory syndrome coronavirus 2
  REGION 1..16: note = Table B: HLA-DRB1*15:03L
TPGDSSSGWTAGAAAY

SEQ ID NO: 26698 - protein, 14 aa, Severe acute respiratory syndrome coronavirus 2
  REGION 1..14: note = Table B: HLA-DRB1*15:03L
TAGAAAYYVGYLQP

SEQ ID NO: 26699 - protein, 13 aa, Severe acute respiratory syndrome coronavirus 2
  REGION 1..13: note = Table B: HLA-DRB1*15:03L
GAAAYYVGYLQPR

SEQ ID NO: 26700 - protein, 15 aa, Severe acute respiratory syndrome coronavirus 2
  REGION 1..15: note = Table B: HLA-DRB1*15:03L
ISNCVADYSVLYNSA

SEQ ID NO: 26701 - protein, 13 aa, Severe acute respiratory syndrome coronavirus 2
  REGION 1..13: note = Table B: HLA-DRB1*15:03L
ASFSTFKCYGVSP

SEQ ID NO: 26702 - protein, 12 aa, Severe acute respiratory syndrome coronavirus 2
  REGION 1..12: note = Table B: HLA-DRB1*15:03L
FNCYFPLQSYGF

SEQ ID NO: 26703 - protein, 14 aa, Severe acute respiratory syndrome coronavirus 2
  REGION 1..14: note = Table B: HLA-DRB1*15:03L
TEVPVAIHADQLTP

SEQ ID NO: 26704 - protein, 15 aa, Severe acute respiratory syndrome coronavirus 2
  REGION 1..15: note = Table B: HLA-DRB1*15:03L
AGICASYQTQTNSPR

SEQ ID NO: 26705 - protein, 14 aa, Severe acute respiratory syndrome coronavirus 2
  REGION 1..14: note = Table B: HLA-DRB1*15:03L
NFTISVTTEILPVS

SEQ ID NO: 26706 - protein, 15 aa, Severe acute respiratory syndrome coronavirus 2
  REGION 1..15: note = Table B: HLA-DRB1*15:03L
LPVSMTKTSVDCTMY

SEQ ID NO: 26707 - protein, 12 aa, Severe acute respiratory syndrome coronavirus 2
  REGION 1..12: note = Table B: HLA-DRB1*15:03L
PPIKDFGGFNFS

SEQ ID NO: 26708 - protein, 13 aa, Severe acute respiratory syndrome coronavirus 2
  REGION 1..13: note = Table B: HLA-DRB1*15:03L
LFNKVTLADAGFI

SEQ ID NO: 26709 - protein, 11 aa, Severe acute respiratory syndrome coronavirus 2
  REGION 1..11: note = Table B: HLA-DRB1*15:03L
KVTLADAGFIK

SEQ ID NO: 26710 - protein, 12 aa, Severe acute respiratory syndrome coronavirus 2
  REGION 1..12: note = Table B: HLA-DRB1*15:03L
GFIKQYGDCLGD

SEQ ID NO: 26711 - protein, 12 aa, Severe acute respiratory syndrome coronavirus 2
  REGION 1..12: note = Table B: HLA-DRB1*15:03L
PFAMQMAYRFNG

SEQ ID NO: 26712 - protein, 13 aa, Severe acute respiratory syndrome coronavirus 2
  REGION 1..13: note = Table B: HLA-DRB1*15:03L
MQMAYRFNGIGVT

SEQ ID NO: 26713 - protein, 13 aa, Severe acute respiratory syndrome coronavirus 2
  REGION 1..13: note = Table B: HLA-DRB1*15:03L
ALNTLVKQLSSNF

SEQ ID NO: 26714 - protein, 12 aa, Severe acute respiratory syndrome coronavirus 2
  REGION 1..12: note = Table B: HLA-DRB1*15:03L
LVKQLSSNFGAI

SEQ ID NO: 26715 - protein, 13 aa, Severe acute respiratory syndrome coronavirus 2
  REGION 1..13: note = Table B: HLA-DRB1*15:03L
ELDKYFKNHTSPD

SEQ ID NO: 26716 - protein, 13 aa, Severe acute respiratory syndrome coronavirus 2
  REGION 1..13: note = Table B: HLA-DRB1*15:03L
QKEIDRLNEVAKN

SEQ ID NO: 26717 - protein, 14 aa, Severe acute respiratory syndrome coronavirus 2
  REGION 1..14: note = Table B: HLA-DRB1*15:03L
LGFIAGLIAIVMVT

SEQ ID NO: 26718 - protein, 14 aa, Severe acute respiratory syndrome coronavirus 2
  REGION 1..14: note = Table B: HLA-DRB1*15:03L
IGTVTLKQGEIKDA

SEQ ID NO: 26719 - protein, 12 aa, Severe acute respiratory syndrome coronavirus 2
  REGION 1..12: note = Table B: HLA-DRB1*15:03L
LLAVFQSASKII

SEQ ID NO: 26720 - protein, 13 aa, Severe acute respiratory syndrome coronavirus 2
  REGION 1..13: note = Table B: HLA-DRB1*15:03L
IITLKKRWQLALS

SEQ ID NO: 26721 - protein, 13 aa, Severe acute respiratory syndrome coronavirus 2
  REGION 1..13: note = Table B: HLA-DRB1*15:03L
SKGVHFVCNLLLL

SEQ ID NO: 26722 - protein, 11 aa, Severe acute respiratory syndrome coronavirus 2
  REGION 1..11: note = Table B: HLA-DRB1*15:03L
APFLYLYALVY

SEQ ID NO: 26723 - protein, 10 aa, Severe acute respiratory syndrome coronavirus 2
  REGION 1..10: note = Table B: HLA-DRB1*15:03L
LVYFLQSINF

SEQ ID NO: 26724 - protein, 12 aa, Severe acute respiratory syndrome coronavirus 2
  REGION 1..12: note = Table B: HLA-DRB1*15:03L
SINFVRIIMRLW

SEQ ID NO: 26725 - protein, 14 aa, Severe acute respiratory syndrome coronavirus 2
  REGION 1..14: note = Table B: HLA-DRB1*15:03L
IIMRLWLCWKCRSK

SEQ ID NO: 26726 - protein, 16 aa, Severe acute respiratory syndrome coronavirus 2
  REGION 1..16: note = Table B: HLA-DRB1*15:03L
IMRLWLCWKCRSKNPL

SEQ ID NO: 26727 - protein, 14 aa, Severe acute respiratory syndrome coronavirus 2
  REGION 1..14: note = Table B: HLA-DRB1*15:03L
GVEHVTFFIYNKIV

SEQ ID NO: 26728 - protein, 13 aa, Severe acute respiratory syndrome coronavirus 2
  REGION 1..13: note = Table B: HLA-DRB1*15:03L
TIDGSSGVVNPVM

SEQ ID NO: 26729 - protein, 11 aa, Severe acute respiratory syndrome coronavirus 2
  REGION 1..11: note = Table B: HLA-DRB1*15:03L
EQWNLVIGFLF

SEQ ID NO: 26730 - protein, 10 aa, Severe acute respiratory syndrome coronavirus 2
  REGION 1..10: note = Table B: HLA-DRB1*15:03L
FLYIIKLIFL

SEQ ID NO: 26731 - protein, 13 aa, Severe acute respiratory syndrome coronavirus 2
  REGION 1..13: note = Table B: HLA-DRB1*15:03L
TRSMWSFNPETNI

SEQ ID NO: 26732 - protein, 13 aa, Severe acute respiratory syndrome coronavirus 2
  REGION 1..13: note = Table B: HLA-DRB1*15:03L
RTLSYYKLGASQR

SEQ ID NO: 26733 - protein, 14 aa, Severe acute respiratory syndrome coronavirus 2
  REGION 1..14: note = Table B: HLA-DRB1*15:03L
RYRIGNYKLNTDHS

SEQ ID NO: 26734 - protein, 14 aa, Severe acute respiratory syndrome coronavirus 2
  REGION 1..14: note = Table B: HLA-DRB1*15:03L
LGSLVVRCSFYEDF

SEQ ID NO: 26735 - protein, 13 aa, Severe acute respiratory syndrome coronavirus 2
  REGION 1..13: note = Table B: HLA-DRB1*15:03L
VVRCSFYEDFLEY

SEQ ID NO: 26736 - protein, 12 aa, Severe acute respiratory syndrome coronavirus 2
  REGION 1..12: note = Table B: HLA-DRB1*15:03L
YEDFLEYHDVRV

SEQ ID NO: 26737 - protein, 14 aa, Severe acute respiratory syndrome coronavirus 2
  REGION 1..14: note = Table B: HLA-DRB1*15:03L
QIGYYRRATRRIRG

SEQ ID NO: 26738 - protein, 15 aa, Severe acute respiratory syndrome coronavirus 2
  REGION 1..15: note = Table B: HLA-DRB1*15:03L
IGYYRRATRRIRGGD

SEQ ID NO: 26739 - protein, 18 aa, Severe acute respiratory syndrome coronavirus 2
  REGION 1..18: note = Table B: HLA-DRB1*15:03L
ATRRIRGGDGKMKDLSPR

SEQ ID NO: 26740 - protein, 14 aa, Severe acute respiratory syndrome coronavirus 2
  REGION 1..14: note = Table B: HLA-DRB1*15:03L
FPFTIYSLLLCRMN

SEQ ID NO: 26741 - protein, 8 aa, Severe acute respiratory syndrome coronavirus 2
  REGION 1..8: note = Table C
DSAEVAVK

SEQ ID NO: 26742 - protein, 8 aa, Severe acute respiratory syndrome coronavirus 2
  REGION 1..8: note = Table C
SAEVAVKM

SEQ ID NO: 26743 - protein, 8 aa, Severe acute respiratory syndrome coronavirus 2
  REGION 1..8: note = Table C
AEVAVKMF

SEQ ID NO: 26744 - protein, 8 aa, Severe acute respiratory syndrome coronavirus 2
  REGION 1..8: note = Table C
VAVKMFDA

SEQ ID NO: 26745 - protein, 8 aa, Severe acute respiratory syndrome coronavirus 2
  REGION 1..8: note = Table C
AVKMFDAY

SEQ ID NO: 26746 - protein, 8 aa, Severe acute respiratory syndrome coronavirus 2
  REGION 1..8: note = Table C
FDAYVNTF

SEQ ID NO: 26747 - protein, 8 aa, Severe acute respiratory syndrome coronavirus 2
  REGION 1..8: note = Table C
HTDFSSEI

SEQ ID NO: 26748 - protein, 8 aa, Severe acute respiratory syndrome coronavirus 2
  REGION 1..8: note = Table C
FSSEIIGY

SEQ ID NO: 26749 - protein, 8 aa, Severe acute respiratory syndrome coronavirus 2
  REGION 1..8: note = Table C
SSEIIGYK

SEQ ID NO: 26750 - protein, 8 aa, Severe acute respiratory syndrome coronavirus 2
  REGION 1..8: note = Table C
SEIIGYKA

SEQ ID NO: 26751 - protein, 8 aa, Severe acute respiratory syndrome coronavirus 2
  REGION 1..8: note = Table C
TDDNALAY

SEQ ID NO: 26752 - protein, 8 aa, Severe acute respiratory syndrome coronavirus 2
  REGION 1..8: note = Table C
DDNALAYY

SEQ ID NO: 26753 - protein, 8 aa, Severe acute respiratory syndrome coronavirus 2
  REGION 1..8: note = Table C
LAYYNTTK

SEQ ID NO: 26754 - protein, 8 aa, Severe acute respiratory syndrome coronavirus 2
  REGION 1..8: note = Table C
TDVVYRAF

SEQ ID NO: 26755 - protein, 8 aa, Severe acute respiratory syndrome coronavirus 2
  REGION 1..8: note = Table C
FDIYNDKV

SEQ ID NO: 26756 - protein, 8 aa, Severe acute respiratory syndrome coronavirus 2
  REGION 1..8: note = Table C
YNDKVAGF

SEQ ID NO: 26757 - protein, 8 aa, Severe acute respiratory syndrome coronavirus 2
  REGION 1..8: note = Table C
VAGFAKFL

SEQ ID NO: 26758 - protein, 8 aa, Severe acute respiratory syndrome coronavirus 2
  REGION 1..8: note = Table C
AGFAKFLK

SEQ ID NO: 26759 - protein, 8 aa, Severe acute respiratory syndrome coronavirus 2
  REGION 1..8: note = Table C
DVTDVTQL

SEQ ID NO: 26760 - protein, 8 aa, Severe acute respiratory syndrome coronavirus 2
  REGION 1..8: note = Table C
VTDVTQLY

SEQ ID NO: 26761 - protein, 8 aa, Severe acute respiratory syndrome coronavirus 2
  REGION 1..8: note = Table C
TDVTQLYL

SEQ ID NO: 26762 - protein, 8 aa, Severe acute respiratory syndrome coronavirus 2
  REGION 1..8: note = Table C
LYLGGMSY

SEQ ID NO: 26763 - protein, 8 aa, Severe acute respiratory syndrome coronavirus 2
  REGION 1..8: note = Table C
YLGGMSYY

SEQ ID NO: 26764 - protein, 9 aa, Severe acute respiratory syndrome coronavirus 2
  REGION 1..9: note = Table C
VGDSAEVAV

SEQ ID NO: 26765 - protein, 9 aa, Severe acute respiratory syndrome coronavirus 2
  REGION 1..9: note = Table C
DSAEVAVKM

SEQ ID NO: 26766 - protein, 9 aa, Severe acute respiratory syndrome coronavirus 2
  REGION 1..9: note = Table C
SAEVAVKMF

SEQ ID NO: 26767 - protein, 9 aa, Severe acute respiratory syndrome coronavirus 2
  REGION 1..9: note = Table C
VAVKMFDAY

SEQ ID NO: 26768 - protein, 9 aa, Severe acute respiratory syndrome coronavirus 2
  REGION 1..9: note = Table C
AVKMFDAYV

SEQ ID NO: 26769 - protein, 9 aa, Severe acute respiratory syndrome coronavirus 2
  REGION 1..9: note = Table C
KMFDAYVNT

SEQ ID NO: 26770 - protein, 9 aa, Severe acute respiratory syndrome coronavirus 2
  REGION 1..9: note = Table C
MFDAYVNTF

SEQ ID NO: 26771 - protein, 9 aa, Severe acute respiratory syndrome coronavirus 2
  REGION 1..9: note = Table C
YVNTFSSTF

SEQ ID NO: 26772 - protein, 9 aa, Severe acute respiratory syndrome coronavirus 2
  REGION 1..9: note = Table C
NTFSSTFNV

SEQ ID NO: 26773 - protein, 9 aa, Severe acute respiratory syndrome coronavirus 2
  REGION 1..9: note = Table C
HVMSKHTDF

SEQ ID NO: 26774 - protein, 9 aa, Severe acute respiratory syndrome coronavirus 2
  REGION 1..9: note = Table C
KHTDFSSEI

SEQ ID NO: 26775 - protein, 9 aa, Severe acute respiratory syndrome coronavirus 2
  REGION 1..9: note = Table C
HTDFSSEII

SEQ ID NO: 26776 - protein, 9 aa, Severe acute respiratory syndrome coronavirus 2
  REGION 1..9: note = Table C
DFSSEIIGY

SEQ ID NO: 26777 - protein, 9 aa, Severe acute respiratory syndrome coronavirus 2
  REGION 1..9: note = Table C
FSSEIIGYK

SEQ ID NO: 26778 - protein, 9 aa, Severe acute respiratory syndrome coronavirus 2
  REGION 1..9: note = Table C
SEIIGYKAI

SEQ ID NO: 26779 - protein, 9 aa, Severe acute respiratory syndrome coronavirus 2
  REGION 1..9: note = Table C
KAIDGGVTR

SEQ ID NO: 26780 - protein, 9 aa, Severe acute respiratory syndrome coronavirus 2
  REGION 1..9: note = Table C
CAAGTTQTA

SEQ ID NO: 26781 - protein, 9 aa, Severe acute respiratory syndrome coronavirus 2
  REGION 1..9: note = Table C
AAGTTQTAC

SEQ ID NO: 26782 - protein, 9 aa, Severe acute respiratory syndrome coronavirus 2
  REGION 1..9: note = Table C
TACTDDNAL

SEQ ID NO: 26783 - protein, 9 aa, Severe acute respiratory syndrome coronavirus 2
  REGION 1..9: note = Table C
CTDDNALAY

SEQ ID NO: 26784 - protein, 9 aa, Severe acute respiratory syndrome coronavirus 2
  REGION 1..9: note = Table C
TDDNALAYY

SEQ ID NO: 26785 - protein, 9 aa, Severe acute respiratory syndrome coronavirus 2
  REGION 1..9: note = Table C
ALAYYNTTK

SEQ ID NO: 26786 - protein, 9 aa, Severe acute respiratory syndrome coronavirus 2
  REGION 1..9: note = Table C
STDVVYRAF

SEQ ID NO: 26787 - protein, 9 aa, Severe acute respiratory syndrome coronavirus 2
  REGION 1..9: note = Table C
VVYRAFDIY

SEQ ID NO: 26788 - protein, 9 aa, Severe acute respiratory syndrome coronavirus 2
  REGION 1..9: note = Table C
AFDIYNDKV

SEQ ID NO: 26789 - protein, 9 aa, Severe acute respiratory syndrome coronavirus 2
  REGION 1..9: note = Table C
FDIYNDKVA

SEQ ID NO: 26790 - protein, 9 aa, Severe acute respiratory syndrome coronavirus 2
  REGION 1..9: note = Table C
IYNDKVAGF

SEQ ID NO: 26791 - protein, 9 aa, Severe acute respiratory syndrome coronavirus 2
  REGION 1..9: note = Table C
KVAGFAKFL

SEQ ID NO: 26792 - protein, 9 aa, Severe acute respiratory syndrome coronavirus 2
  REGION 1..9: note = Table C
VAGFAKFLK

SEQ ID NO: 26793 - protein, 9 aa, Severe acute respiratory syndrome coronavirus 2
  REGION 1..9: note = Table C
AGFAKFLKT

SEQ ID NO: 26794 - protein, 9 aa, Severe acute respiratory syndrome coronavirus 2
  REGION 1..9: note = Table C
DVTDVTQLY

SEQ ID NO: 26795 - protein, 9 aa, Severe acute respiratory syndrome coronavirus 2
  REGION 1..9: note = Table C
VTDVTQLYL

SEQ ID NO: 26796 - protein, 9 aa, Severe acute respiratory syndrome coronavirus 2
  REGION 1..9: note = Table C
QLYLGGMSY

SEQ ID NO: 26797 - protein, 9 aa, Severe acute respiratory syndrome coronavirus 2
  REGION 1..9: note = Table C
LYLGGMSYY

SEQ ID NO: 26798 - protein, 10 aa, Severe acute respiratory syndrome coronavirus 2
  REGION 1..10: note = Table C
VGDSAEVAVK

SEQ ID NO: 26799 - protein, 10 aa, Severe acute respiratory syndrome coronavirus 2
  REGION 1..10: note = Table C
DSAEVAVKMF

SEQ ID NO: 26800 - protein, 10 aa, Severe acute respiratory syndrome coronavirus 2
  REGION 1..10: note = Table C
AEVAVKMFDA

SEQ ID NO: 26801 - protein, 10 aa, Severe acute respiratory syndrome coronavirus 2
  REGION 1..10: note = Table C
EVAVKMFDAY

SEQ ID NO: 26802 - protein, 10 aa, Severe acute respiratory syndrome coronavirus 2
  REGION 1..10: note = Table C
KMFDAYVNTF

SEQ ID NO: 26803 - protein, 10 aa, Severe acute respiratory syndrome coronavirus 2
  REGION 1..10: note = Table C
AYVNTFSSTF

SEQ ID NO: 26804 - protein, 10 aa, Severe acute respiratory syndrome coronavirus 2
  REGION 1..10: note = Table C
KHTDFSSEII

SEQ ID NO: 26805 - protein, 10 aa, Severe acute respiratory syndrome coronavirus 2
  REGION 1..10: note = Table C
TDFSSEIIGY

SEQ ID NO: 26806 - protein, 10 aa, Severe acute respiratory syndrome coronavirus 2
  REGION 1..10: note = Table C
DFSSEIIGYK

SEQ ID NO: 26807 - protein, 10 aa, Severe acute respiratory syndrome coronavirus 2
  REGION 1..10: note = Table C
FSSEIIGYKA

SEQ ID NO: 26808 - protein, 10 aa, Severe acute respiratory syndrome coronavirus 2
  REGION 1..10: note = Table C
EIIGYKAIDG

SEQ ID NO: 26809 - protein, 10 aa, Severe acute respiratory syndrome coronavirus 2
  REGION 1..10: note = Table C
CTDDNALAYY

SEQ ID NO: 26810 - protein, 10 aa, Severe acute respiratory syndrome coronavirus 2
  REGION 1..10: note = Table C
NALAYYNTTK

SEQ ID NO: 26811 - protein, 10 aa, Severe acute respiratory syndrome coronavirus 2
  REGION 1..10: note = Table C
RAFDIYNDKV

SEQ ID NO: 26812 - protein, 10 aa, Severe acute respiratory syndrome coronavirus 2
  REGION 1..10: note = Table C
DIYNDKVAGF

SEQ ID NO: 26813 - protein, 10 aa, Severe acute respiratory syndrome coronavirus 2
  REGION 1..10: note = Table C
KVAGFAKFLK

SEQ ID NO: 26814 - protein, 10 aa, Severe acute respiratory syndrome coronavirus 2
  REGION 1..10: note = Table C
GCDVTDVTQL

SEQ ID NO: 26815 - protein, 10 aa, Severe acute respiratory syndrome coronavirus 2
  REGION 1..10: note = Table C
DVTDVTQLYL

SEQ ID NO: 26816 - protein, 10 aa, Severe acute respiratory syndrome coronavirus 2
  REGION 1..10: note = Table C
VTDVTQLYLG

SEQ ID NO: 26817 - protein, 10 aa, Severe acute respiratory syndrome coronavirus 2
  REGION 1..10: note = Table C
DVTQLYLGGM

SEQ ID NO: 26818 - protein, 10 aa, Severe acute respiratory syndrome coronavirus 2
  REGION 1..10: note = Table C
TQLYLGGMSY

SEQ ID NO: 26819 - protein, 10 aa, Severe acute respiratory syndrome coronavirus 2
  REGION 1..10: note = Table C
QLYLGGMSYY

SEQ ID NO: 26820 - protein, 11 aa, Severe acute respiratory syndrome coronavirus 2
  REGION 1..11: note = Table C
VGDSAEVAVKM

SEQ ID NO: 26821 - protein, 11 aa, Severe acute respiratory syndrome coronavirus 2
  REGION 1..11: note = Table C
AEVAVKMFDAY

SEQ ID NO: 26822 - protein, 11 aa, Severe acute respiratory syndrome coronavirus 2
  REGION 1..11: note = Table C
EVAVKMFDAYV

SEQ ID NO: 26823 - protein, 11 aa, Severe acute respiratory syndrome coronavirus 2
  REGION 1..11: note = Table C
DAYVNTFSSTF

SEQ ID NO: 26824 - protein, 11 aa, Severe acute respiratory syndrome coronavirus 2
  REGION 1..11: note = Table C
HTDFSSEIIGY

SEQ ID NO: 26825 - protein, 11 aa, Severe acute respiratory syndrome coronavirus 2
  REGION 1..11: note = Table C
TDFSSEIIGYK

SEQ ID NO: 26826 - protein, 11 aa, Severe acute respiratory syndrome coronavirus 2
  REGION 1..11: note = Table C
EIIGYKAIDGG

SEQ ID NO: 26827 - protein, 11 aa, Severe acute respiratory syndrome coronavirus 2
  REGION 1..11: note = Table C
GYKAIDGGVTR

SEQ ID NO: 26828 - protein, 11 aa, Severe acute respiratory syndrome coronavirus 2
  REGION 1..11: note = Table C
TACTDDNALAY

SEQ ID NO: 26829 - protein, 11 aa, Severe acute respiratory syndrome coronavirus 2
  REGION 1..11: note = Table C
IYNDKVAGFAK

SEQ ID NO: 26830 - protein, 11 aa, Severe acute respiratory syndrome coronavirus 2
  REGION 1..11: note = Table C
KVAGFAKFLKT

SEQ ID NO: 26831 - protein, 11 aa, Severe acute respiratory syndrome coronavirus 2
  REGION 1..11: note = Table C
GCDVTDVTQLY

SEQ ID NO: 26832 - protein, 11 aa, Severe acute respiratory syndrome coronavirus 2
  REGION 1..11: note = Table C
DVTDVTQLYLG

SEQ ID NO: 26833 - protein, 11 aa, Severe acute respiratory syndrome coronavirus 2
  REGION 1..11: note = Table C
VTQLYLGGMSY

SEQ ID NO: 26834 - protein, 11 aa, Severe acute respiratory syndrome coronavirus 2
  REGION 1..11: note = Table C
TQLYLGGMSYY

SEQ ID NO: 26835 - protein, 8 aa, Severe acute respiratory syndrome coronavirus 2
  REGION 1..8: note = Table C
LFMRIFTI

SEQ ID NO: 26836 - protein, 8 aa, Severe acute respiratory syndrome coronavirus 2
  REGION 1..8: note = Table C
RIFTIGTV

SEQ ID NO: 26837 - protein, 8 aa, Severe acute respiratory syndrome coronavirus 2
  REGION 1..8: note = Table C
FTIGTVTL

SEQ ID NO: 26838 - protein, 8 aa, Severe acute respiratory syndrome coronavirus 2
  REGION 1..8: note = Table C
TIGTVTLK

SEQ ID NO: 26839 - protein, 8 aa, Severe acute respiratory syndrome coronavirus 2
  REGION 1..8: note = Table C
VTLKQGEI

SEQ ID NO: 26840 - protein, 8 aa, Severe acute respiratory syndrome coronavirus 2
  REGION 1..8: note = Table C
GEIKDATP

SEQ ID NO: 26841 - protein, 8 aa, Severe acute respiratory syndrome coronavirus 2
  REGION 1..8: note = Table C
DATPSDFV

SEQ ID NO: 26842 - protein, 8 aa, Severe acute respiratory syndrome coronavirus 2
  REGION 1..8: note = Table C
TPSDFVRA

SEQ ID NO: 26843 - protein, 8 aa, Severe acute respiratory syndrome coronavirus 2
  REGION 1..8: note = Table C
SDFVRATA

SEQ ID NO: 26844 - protein, 8 aa, Severe acute respiratory syndrome coronavirus 2
  REGION 1..8: note = Table C
FVRATATI

SEQ ID NO: 26845 - protein, 8 aa, Severe acute respiratory syndrome coronavirus 2
  REGION 1..8: note = Table C
TATIPIQA

SEQ ID NO: 26846 - protein, 8 aa, Severe acute respiratory syndrome coronavirus 2
  REGION 1..8: note = Table C
QASLPFGW

SEQ ID NO: 26847 - protein, 8 aa, Severe acute respiratory syndrome coronavirus 2
  REGION 1..8: note = Table C
AVFQSASK

SEQ ID NO: 26848 - protein, 8 aa, Severe acute respiratory syndrome coronavirus 2
  REGION 1..8: note = Table C
VFQSASKI

SEQ ID NO: 26849 - protein, 8 aa, Severe acute respiratory syndrome coronavirus 2
  REGION 1..8: note = Table C
FQSASKII

SEQ ID NO: 26850 - protein, 8 aa, Severe acute respiratory syndrome coronavirus 2
  REGION 1..8: note = Table C
SASKIITL

SEQ ID NO: 26851 - protein, 8 aa, Severe acute respiratory syndrome coronavirus 2
  REGION 1..8: note = Table C
ASKIITLK

SEQ ID NO: 26852 - protein, 8 aa, Severe acute respiratory syndrome coronavirus 2
  REGION 1..8: note = Table C
TLKKRWQL

SEQ ID NO: 26853 - protein, 8 aa, Severe acute respiratory syndrome coronavirus 2
  REGION 1..8: note = Table C
LYLYALVY

SEQ ID NO: 26854 - protein, 8 aa, Severe acute respiratory syndrome coronavirus 2
  REGION 1..8: note = Table C
YFLQSINF

SEQ ID NO: 26855 - protein, 8 aa, Severe acute respiratory syndrome coronavirus 2
  REGION 1..8: note = Table C
FLQSINFV

SEQ ID NO: 26856 - protein, 8 aa, Severe acute respiratory syndrome coronavirus 2
  REGION 1..8: note = Table C
QSINFVRI

SEQ ID NO: 26857 - protein, 8 aa, Severe acute respiratory syndrome coronavirus 2
  REGION 1..8: note = Table C
SINFVRII

SEQ ID NO: 26858 - protein, 8 aa, Severe acute respiratory syndrome coronavirus 2
  REGION 1..8: note = Table C
DCVVLHSY

SEQ ID NO: 26859 - protein, 8 aa, Severe acute respiratory syndrome coronavirus 2
  REGION 1..8: note = Table C
SYFTSDYY

SEQ ID NO: 26860 - protein, 8 aa, Severe acute respiratory syndrome coronavirus 2
  REGION 1..8: note = Table C
TSDYYQLY

SEQ ID NO: 26861 - protein, 8 aa, Severe acute respiratory syndrome coronavirus 2
  REGION 1..8: note = Table C
YQLYSTQL

SEQ ID NO: 26862 - protein, 8 aa, Severe acute respiratory syndrome coronavirus 2
  REGION 1..8: note = Table C
TGVEHVTF

SEQ ID NO: 26863 - protein, 8 aa, Severe acute respiratory syndrome coronavirus 2
  REGION 1..8: note = Table C
VEHVTFFI

SEQ ID NO: 26864 - protein, 8 aa, Severe acute respiratory syndrome coronavirus 2
  REGION 1..8: note = Table C
EHVTFFIY

SEQ ID NO: 26865 - protein, 8 aa, Severe acute respiratory syndrome coronavirus 2
  REGION 1..8: note = Table C
VTFFIYNK

SEQ ID NO: 26866 - protein, 8 aa, Severe acute respiratory syndrome coronavirus 2
  REGION 1..8: note = Table C
EHVQIHTI

SEQ ID NO: 26867 - protein, 8 aa, Severe acute respiratory syndrome coronavirus 2
  REGION 1..8: note = Table C
TIDGSSGV

SEQ ID NO: 26868 - protein, 9 aa, Severe acute respiratory syndrome coronavirus 2
  REGION 1..9: note = Table C
DLFMRIFTI

SEQ ID NO: 26869 - protein, 9 aa, Severe acute respiratory syndrome coronavirus 2
  REGION 1..9: note = Table C
MRIFTIGTV

SEQ ID NO: 26870 - protein, 9 aa, Severe acute respiratory syndrome coronavirus 2
  REGION 1..9: note = Table C
IFTIGTVTL

SEQ ID NO: 26871 - protein, 9 aa, Severe acute respiratory syndrome coronavirus 2
  REGION 1..9: note = Table C
FTIGTVTLK

SEQ ID NO: 26872 - protein, 9 aa, Severe acute respiratory syndrome coronavirus 2
  REGION 1..9: note = Table C
VTLKQGEIK

SEQ ID NO: 26873 - protein, 9 aa, Severe acute respiratory syndrome coronavirus 2
  REGION 1..9: note = Table C
GEIKDATPS

SEQ ID NO: 26874 - protein, 9 aa, Severe acute respiratory syndrome coronavirus 2
  REGION 1..9: note = Table C
IKDATPSDF

SEQ ID NO: 26875 - protein, 9 aa, Severe acute respiratory syndrome coronavirus 2
  REGION 1..9: note = Table C
DATPSDFVR

SEQ ID NO: 26876 - protein, 9 aa, Severe acute respiratory syndrome coronavirus 2
  REGION 1..9: note = Table C
ATPSDFVRA

SEQ ID NO: 26877 - protein, 9 aa, Severe acute respiratory syndrome coronavirus 2
  REGION 1..9: note = Table C
TPSDFVRAT

SEQ ID NO: 26878 - protein, 9 aa, Severe acute respiratory syndrome coronavirus 2
  REGION 1..9: note = Table C
SDFVRATAT

SEQ ID NO: 26879 - protein, 9 aa, Severe acute respiratory syndrome coronavirus 2
  REGION 1..9: note = Table C
DFVRATATI

SEQ ID NO: 26880 - protein, 9 aa, Severe acute respiratory syndrome coronavirus 2
  REGION 1..9: note = Table C
ATATIPIQA

SEQ ID NO: 26881 - protein, 9 aa, Severe acute respiratory syndrome coronavirus 2
  REGION 1..9: note = Table C
ATIPIQASL

SEQ ID NO: 26882 - protein, 9 aa, Severe acute respiratory syndrome coronavirus 2
  REGION 1..9: note = Table C
IPIQASLPF

SEQ ID NO: 26883 - protein, 9 aa, Severe acute respiratory syndrome coronavirus 2
  REGION 1..9: note = Table C
IQASLPFGW

SEQ ID NO: 26884 - protein, 9 aa, Severe acute respiratory syndrome coronavirus 2
  REGION 1..9: note = Table C
ASLPFGWLI

SEQ ID NO: 26885 - protein, 9 aa, Severe acute respiratory syndrome coronavirus 2
  REGION 1..9: note = Table C
LAVFQSASK

SEQ ID NO: 26886 - protein, 9 aa, Severe acute respiratory syndrome coronavirus 2
  REGION 1..9: note = Table C
AVFQSASKI

SEQ ID NO: 26887 - protein, 9 aa, Severe acute respiratory syndrome coronavirus 2
  REGION 1..9: note = Table C
VFQSASKII

SEQ ID NO: 26888 - protein, 9 aa, Severe acute respiratory syndrome coronavirus 2
  REGION 1..9: note = Table C
QSASKIITL

SEQ ID NO: 26889 - protein, 9 aa, Severe acute respiratory syndrome coronavirus 2
  REGION 1..9: note = Table C
SASKIITLK

SEQ ID NO: 26890 - protein, 9 aa, Severe acute respiratory syndrome coronavirus 2
  REGION 1..9: note = Table C
ASKIITLKK

SEQ ID NO: 26891 - protein, 9 aa, Severe acute respiratory syndrome coronavirus 2
  REGION 1..9: note = Table C
KIITLKKRW

SEQ ID NO: 26892 - protein, 9 aa, Severe acute respiratory syndrome coronavirus 2
  REGION 1..9: note = Table C
ITLKKRWQL

SEQ ID NO: 26893 - protein, 9 aa, Severe acute respiratory syndrome coronavirus 2
  REGION 1..9: note = Table C
KRWQLALSK

SEQ ID NO: 26894 - protein, 9 aa, Severe acute respiratory syndrome coronavirus 2
  REGION 1..9: note = Table C
WQLALSKGV

SEQ ID NO: 26895 - protein, 9 aa, Severe acute respiratory syndrome coronavirus 2
  REGION 1..9: note = Table C
LALSKGVHF

SEQ ID NO: 26896 - protein, 9 aa, Severe acute respiratory syndrome coronavirus 2
  REGION 1..9: note = Table C
ALSKGVHFV

SEQ ID NO: 26897 - protein, 9 aa, Severe acute respiratory syndrome coronavirus 2
  REGION 1..9: note = Table C
VHFVCNLLL

SEQ ID NO: 26898 - protein, 9 aa, Severe acute respiratory syndrome coronavirus 2
  REGION 1..9: note = Table C
YLYALVYFL

SEQ ID NO: 26899 - protein, 9 aa, Severe acute respiratory syndrome coronavirus 2
  REGION 1..9: note = Table C
ALVYFLQSI

SEQ ID NO: 26900 - protein, 9 aa, Severe acute respiratory syndrome coronavirus 2
  REGION 1..9: note = Table C
VYFLQSINF

SEQ ID NO: 26901 - protein, 9 aa, Severe acute respiratory syndrome coronavirus 2
  REGION 1..9: note = Table C
YFLQSINFV

SEQ ID NO: 26902 - protein, 9 aa, Severe acute respiratory syndrome coronavirus 2
  REGION 1..9: note = Table C
FLQSINFVR

SEQ ID NO: 26903 - protein, 9 aa, Severe acute respiratory syndrome coronavirus 2
  REGION 1..9: note = Table C
LQSINFVRI

SEQ ID NO: 26904 - protein, 9 aa, Severe acute respiratory syndrome coronavirus 2
  REGION 1..9: note = Table C
QSINFVRII

SEQ ID NO: 26905 - protein, 9 aa, Severe acute respiratory syndrome coronavirus 2
  REGION 1..9: note = Table C
SINFVRIIM

SEQ ID NO: 26906 - protein, 9 aa, Severe acute respiratory syndrome coronavirus 2
  REGION 1..9: note = Table C
HSYFTSDYY

SEQ ID NO: 26907 - protein, 9 aa, Severe acute respiratory syndrome coronavirus 2
  REGION 1..9: note = Table C
YFTSDYYQL

SEQ ID NO: 26908 - protein, 9 aa, Severe acute respiratory syndrome coronavirus 2
  REGION 1..9: note = Table C
FTSDYYQLY

SEQ ID NO: 26909 - protein, 9 aa, Severe acute respiratory syndrome coronavirus 2
  REGION 1..9: note = Table C
YYQLYSTQL

SEQ ID NO: 26910 - protein, 9 aa, Severe acute respiratory syndrome coronavirus 2
  REGION 1..9: note = Table C
QLYSTQLST

SEQ ID NO: 26911 - protein, 9 aa, Severe acute respiratory syndrome coronavirus 2
  REGION 1..9: note = Table C
TQLSTDTGV

SEQ ID NO: 26912 - protein, 9 aa, Severe acute respiratory syndrome coronavirus 2
  REGION 1..9: note = Table C
LSTDTGVEH

SEQ ID NO: 26913 - protein, 9 aa, Severe acute respiratory syndrome coronavirus 2
  REGION 1..9: note = Table C
STDTGVEHV

SEQ ID NO: 26914 - protein, 9 aa, Severe acute respiratory syndrome coronavirus 2
  REGION 1..9: note = Table C
DTGVEHVTF

SEQ ID NO: 26915 - protein, 9 aa, Severe acute respiratory syndrome coronavirus 2
  REGION 1..9: note = Table C
TGVEHVTFF

SEQ ID NO: 26916 - protein, 9 aa, Severe acute respiratory syndrome coronavirus 2
  REGION 1..9: note = Table C
VEHVTFFIY

SEQ ID NO: 26917 - protein, 9 aa, Severe acute respiratory syndrome coronavirus 2
  REGION 1..9: note = Table C
HVTFFIYNK

SEQ ID NO: 26918 - protein, 9 aa, Severe acute respiratory syndrome coronavirus 2
  REGION 1..9: note = Table C
VTFFIYNKI

SEQ ID NO: 26919 - protein, 9 aa, Severe acute respiratory syndrome coronavirus 2
  REGION 1..9: note = Table C
IVDEPEEHV

SEQ ID NO: 26920 - protein, 9 aa, Severe acute respiratory syndrome coronavirus 2
  REGION 1..9: note = Table C
DEPEEHVQI

SEQ ID NO: 26921 - protein, 9 aa, Severe acute respiratory syndrome coronavirus 2
  REGION 1..9: note = Table C
EPEEHVQIH

SEQ ID NO: 26922 - protein, 9 aa, Severe acute respiratory syndrome coronavirus 2
  REGION 1..9: note = Table C
EEHVQIHTI

SEQ ID NO: 26923 - protein, 9 aa, Severe acute respiratory syndrome coronavirus 2
  REGION 1..9: note = Table C
HTIDGSSGV

SEQ ID NO: 26924 - protein, 10 aa, Severe acute respiratory syndrome coronavirus 2
  REGION 1..10: note = Table C
FMRIFTIGTV

SEQ ID NO: 26925 - protein, 10 aa, Severe acute respiratory syndrome coronavirus 2
  REGION 1..10: note = Table C
RIFTIGTVTL

SEQ ID NO: 26926 - protein, 10 aa, Severe acute respiratory syndrome coronavirus 2
  REGION 1..10: note = Table C
FTIGTVTLKQ

SEQ ID NO: 26927 - protein, 10 aa, Severe acute respiratory syndrome coronavirus 2
  REGION 1..10: note = Table C
GTVTLKQGEI

SEQ ID NO: 26928 - protein, 10 aa, Severe acute respiratory syndrome coronavirus 2
  REGION 1..10: note = Table C
TLKQGEIKDA

SEQ ID NO: 26929 - protein, 10 aa, Severe acute respiratory syndrome coronavirus 2
  REGION 1..10: note = Table C
EIKDATPSDF

SEQ ID NO: 26930 - protein, 10 aa, Severe acute respiratory syndrome coronavirus 2
  REGION 1..10: note = Table C
DATPSDFVRA

SEQ ID NO: 26931 - protein, 10 aa, Severe acute respiratory syndrome coronavirus 2
  REGION 1..10: note = Table C
TPSDFVRATA

SEQ ID NO: 26932 - protein, 10 aa, Severe acute respiratory syndrome coronavirus 2
  REGION 1..10: note = Table C
RATATIPIQA

SEQ ID NO: 26933 - protein, 10 aa, Severe acute respiratory syndrome coronavirus 2
  REGION 1..10: note = Table C
FQSASKIITL

SEQ ID NO: 26934 - protein, 10 aa, Severe acute respiratory syndrome coronavirus 2
  REGION 1..10: note = Table C
QSASKIITLK

SEQ ID NO: 26935 - protein, 10 aa, Severe acute respiratory syndrome coronavirus 2
  REGION 1..10: note = Table C
SASKIITLKK

SEQ ID NO: 26936 - protein, 10 aa, Severe acute respiratory syndrome coronavirus 2
  REGION 1..10: note = Table C
FLQSINFVRI

SEQ ID NO: 26937 - protein, 10 aa, Severe acute respiratory syndrome coronavirus 2
  REGION 1..10: note = Table C
SINFVRIIMR

SEQ ID NO: 26938 - protein, 10 aa, Severe acute respiratory syndrome coronavirus 2
  REGION 1..10: note = Table C
LHSYFTSDYY

SEQ ID NO: 26939 - protein, 10 aa, Severe acute respiratory syndrome coronavirus 2
  REGION 1..10: note = Table C
SYFTSDYYQL

SEQ ID NO: 26940 - protein, 10 aa, Severe acute respiratory syndrome coronavirus 2
  REGION 1..10: note = Table C
YFTSDYYQLY

SEQ ID NO: 26941 - protein, 10 aa, Severe acute respiratory syndrome coronavirus 2
  REGION 1..10: note = Table C
DYYQLYSTQL

SEQ ID NO: 26942 - protein, 10 aa, Severe acute respiratory syndrome coronavirus 2
  REGION 1..10: note = Table C
LSTDTGVEHV

SEQ ID NO: 26943 - protein, 10 aa, Severe acute respiratory syndrome coronavirus 2
  REGION 1..10: note = Table C
TDTGVEHVTF

SEQ ID NO: 26944 - protein, 10 aa, Severe acute respiratory syndrome coronavirus 2
  REGION 1..10: note = Table C
KIVDEPEEHV

SEQ ID NO: 26945 - protein, 10 aa, Severe acute respiratory syndrome coronavirus 2
  REGION 1..10: note = Table C
EHVQIHTIDG

SEQ ID NO: 26946 - protein, 11 aa, Severe acute respiratory syndrome coronavirus 2
  REGION 1..11: note = Table C
MRIFTIGTVTL

SEQ ID NO: 26947 - protein, 11 aa, Severe acute respiratory syndrome coronavirus 2
  REGION 1..11: note = Table C
RIFTIGTVTLK

SEQ ID NO: 26948 - protein, 11 aa, Severe acute respiratory syndrome coronavirus 2
  REGION 1..11: note = Table C
FTIGTVTLKQG

SEQ ID NO: 26949 - protein, 11 aa, Severe acute respiratory syndrome coronavirus 2
  REGION 1..11: note = Table C
GEIKDATPSDF

SEQ ID NO: 26950 - protein, 11 aa, Severe acute respiratory syndrome coronavirus 2
  REGION 1..11: note = Table C
EIKDATPSDFV

SEQ ID NO: 26951 - protein, 11 aa, Severe acute respiratory syndrome coronavirus 2
  REGION 1..11: note = Table C
TPSDFVRATAT

SEQ ID NO: 26952 - protein, 11 aa, Severe acute respiratory syndrome coronavirus 2
  REGION 1..11: note = Table C
IPIQASLPFGW

SEQ ID NO: 26953 - protein, 11 aa, Severe acute respiratory syndrome coronavirus 2
  REGION 1..11: note = Table C
VFQSASKIITL

SEQ ID NO: 26954 - protein, 11 aa, Severe acute respiratory syndrome coronavirus 2
  REGION 1..11: note = Table C
KIITLKKRWQL

SEQ ID NO: 26955 - protein, 11 aa, Severe acute respiratory syndrome coronavirus 2
  REGION 1..11: note = Table C
YFLQSINFVRI

SEQ ID NO: 26956 - protein, 11 aa, Severe acute respiratory syndrome coronavirus 2
  REGION 1..11: note = Table C
QSINFVRIIMR

SEQ ID NO: 26957 - protein, 11 aa, Severe acute respiratory syndrome coronavirus 2
  REGION 1..11: note = Table C
VLHSYFTSDYY

SEQ ID NO: 26958 - protein, 11 aa, Severe acute respiratory syndrome coronavirus 2
  REGION 1..11: note = Table C
SYFTSDYYQLY

SEQ ID NO: 26959 - protein, 11 aa, Severe acute respiratory syndrome coronavirus 2
  REGION 1..11: note = Table C
QLSTDTGVEHV

SEQ ID NO: 26960 - protein, 11 aa, Severe acute respiratory syndrome coronavirus 2
  REGION 1..11: note = Table C
STDTGVEHVTF

SEQ ID NO: 26961 - protein, 11 aa, Severe acute respiratory syndrome coronavirus 2
  REGION 1..11: note = Table C
EHVTFFIYNKI

SEQ ID NO: 26962 - protein, 11 aa, Severe acute respiratory syndrome coronavirus 2
  REGION 1..11: note = Table C
IVDEPEEHVQI

SEQ ID NO: 26963 - protein, 8 aa, Severe acute respiratory syndrome coronavirus 2
  REGION 1..8: note = Table C
IVNVSLVK

SEQ ID NO: 26964 - protein, 8 aa, Severe acute respiratory syndrome coronavirus 2
  REGION 1..8: note = Table C
VSLVKPSF

SEQ ID NO: 26965 - protein, 8 aa, Severe acute respiratory syndrome coronavirus 2
  REGION 1..8: note = Table C
LVKPSFYV

SEQ ID NO: 26966 - protein, 8 aa, Severe acute respiratory syndrome coronavirus 2
  REGION 1..8: note = Table C
VKPSFYVY

SEQ ID NO: 26967 - protein, 9 aa, Severe acute respiratory syndrome coronavirus 2
  REGION 1..9: note = Table C
NIVNVSLVK

SEQ ID NO: 26968 - protein, 9 aa, Severe acute respiratory syndrome coronavirus 2
  REGION 1..9: note = Table C
NVSLVKPSF

SEQ ID NO: 26969 - protein, 9 aa, Severe acute respiratory syndrome coronavirus 2
  REGION 1..9: note = Table C
VSLVKPSFY

SEQ ID NO: 26970 - protein, 9 aa, Severe acute respiratory syndrome coronavirus 2
  REGION 1..9: note = Table C
SLVKPSFYV

SEQ ID NO: 26971 - protein, 9 aa, Severe acute respiratory syndrome coronavirus 2
  REGION 1..9: note = Table C
LVKPSFYVY

SEQ ID NO: 26972 - protein, 9 aa, Severe acute respiratory syndrome coronavirus 2
  REGION 1..9: note = Table C
PSFYVYSRV

SEQ ID NO: 26973 - protein, 9 aa, Severe acute respiratory syndrome coronavirus 2
  REGION 1..9: note = Table C
SFYVYSRVK

SEQ ID NO: 26974 - protein, 9 aa, Severe acute respiratory syndrome coronavirus 2
  REGION 1..9: note = Table C
YVYSRVKNL

SEQ ID NO: 26975 - protein, 9 aa, Severe acute respiratory syndrome coronavirus 2
  REGION 1..9: note = Table C
RVKNLNSSR

SEQ ID NO: 26976 - protein, 10 aa, Severe acute respiratory syndrome coronavirus 2
  REGION 1..10: note = Table C
SLVKPSFYVY

SEQ ID NO: 26977 - protein, 10 aa, Severe acute respiratory syndrome coronavirus 2
  REGION 1..10: note = Table C
SRVKNLNSSR

SEQ ID NO: 26978 - protein, 10 aa, Severe acute respiratory syndrome coronavirus 2
  REGION 1..10: note = Table C
RVKNLNSSRV

SEQ ID NO: 26979 - protein, 11 aa, Severe acute respiratory syndrome coronavirus 2
  REGION 1..11: note = Table C
IVNVSLVKPSF

SEQ ID NO: 26980 - protein, 11 aa, Severe acute respiratory syndrome coronavirus 2
  REGION 1..11: note = Table C
LVKPSFYVYSR

SEQ ID NO: 26981 - protein, 8 aa, Severe acute respiratory syndrome coronavirus 2
  REGION 1..8: note = Table C
FAYANRNR

SEQ ID NO: 26982 - protein, 8 aa, Severe acute respiratory syndrome coronavirus 2
  REGION 1..8: note = Table C
YANRNRFL

SEQ ID NO: 26983 - protein, 8 aa, Severe acute respiratory syndrome coronavirus 2
  REGION 1..8: note = Table C
FLYIIKLI

SEQ ID NO: 26984 - protein, 8 aa, Severe acute respiratory syndrome coronavirus 2
  REGION 1..8: note = Table C
YIIKLIFL

SEQ ID NO: 26985 - protein, 8 aa, Severe acute respiratory syndrome coronavirus 2
  REGION 1..8: note = Table C
LMWLSYFI

SEQ ID NO: 26986 - protein, 8 aa, Severe acute respiratory syndrome coronavirus 2
  REGION 1..8: note = Table C
SYFIASFR

SEQ ID NO: 26987 - protein, 8 aa, Severe acute respiratory syndrome coronavirus 2
  REGION 1..8: note = Table C
YFIASFRL

SEQ ID NO: 26988 - protein, 8 aa, Severe acute respiratory syndrome coronavirus 2
  REGION 1..8: note = Table C
FIASFRLF

SEQ ID NO: 26989 - protein, 8 aa, Severe acute respiratory syndrome coronavirus 2
  REGION 1..8: note = Table C
ASFRLFAR

SEQ ID NO: 26990 - protein, 8 aa, Severe acute respiratory syndrome coronavirus 2
  REGION 1..8: note = Table C
RTRSMWSF

SEQ ID NO: 26991 - protein, 8 aa, Severe acute respiratory syndrome coronavirus 2
  REGION 1..8: note = Table C
VPLHGTIL

SEQ ID NO: 26992 - protein, 8 aa, Severe acute respiratory syndrome coronavirus 2
  REGION 1..8: note = Table C
TILTRPLL

SEQ ID NO: 26993 - protein, 8 aa, Severe acute respiratory syndrome coronavirus 2
  REGION 1..8: note = Table C
RPLLESEL

SEQ ID NO: 26994 - protein, 8 aa, Severe acute respiratory syndrome coronavirus 2
  REGION 1..8: note = Table C
TSRTLSYY

SEQ ID NO: 26995 - protein, 8 aa, Severe acute respiratory syndrome coronavirus 2
  REGION 1..8: note = Table C
RTLSYYKL

SEQ ID NO: 26996 - protein, 8 aa, Severe acute respiratory syndrome coronavirus 2
  REGION 1..8: note = Table C
KLGASQRV

SEQ ID NO: 26997 - protein, 8 aa, Severe acute respiratory syndrome coronavirus 2
  REGION 1..8: note = Table C
GDSGFAAY

SEQ ID NO: 26998 - protein, 8 aa, Severe acute respiratory syndrome coronavirus 2
  REGION 1..8: note = Table C
FAAYSRYR

SEQ ID NO: 26999 - protein, 9 aa, Severe acute respiratory syndrome coronavirus 2
  REGION 1..9: note = Table C
LLQFAYANR

SEQ ID NO: 27000 - protein, 9 aa, Severe acute respiratory syndrome coronavirus 2
  REGION 1..9: note = Table C
QFAYANRNR

SEQ ID NO: 27001 - protein, 9 aa, Severe acute respiratory syndrome coronavirus 2
  REGION 1..9: note = Table C
FAYANRNRF

SEQ ID NO: 27002 - protein, 9 aa, Severe acute respiratory syndrome coronavirus 2
  REGION 1..9: note = Table C
AYANRNRFL

SEQ ID NO: 27003 - protein, 9 aa, Severe acute respiratory syndrome coronavirus 2
  REGION 1..9: note = Table C
YANRNRFLY

SEQ ID NO: 27004 - protein, 9 aa, Severe acute respiratory syndrome coronavirus 2
  REGION 1..9: note = Table C
ANRNRFLYI

SEQ ID NO: 27005 - protein, 9 aa, Severe acute respiratory syndrome coronavirus 2
  REGION 1..9: note = Table C
NRFLYIIKL

SEQ ID NO: 27006 - protein, 9 aa, Severe acute respiratory syndrome coronavirus 2
  REGION 1..9: note = Table C
RFLYIIKLI

SEQ ID NO: 27007 - protein, 9 aa, Severe acute respiratory syndrome coronavirus 2
  REGION 1..9: note = Table C
LYIIKLIFL

SEQ ID NO: 27008 - protein, 9 aa, Severe acute respiratory syndrome coronavirus 2
  REGION 1..9: note = Table C
YIIKLIFLW

SEQ ID NO: 27009 - protein, 9 aa, Severe acute respiratory syndrome coronavirus 2
  REGION 1..9: note = Table C
LVGLMWLSY

SEQ ID NO: 27010 - protein, 9 aa, Severe acute respiratory syndrome coronavirus 2
  REGION 1..9: note = Table C
WLSYFIASF

SEQ ID NO: 27011 - protein, 9 aa, Severe acute respiratory syndrome coronavirus 2
  REGION 1..9: note = Table C
LSYFIASFR

SEQ ID NO: 27012 - protein, 9 aa, Severe acute respiratory syndrome coronavirus 2
  REGION 1..9: note = Table C
SYFIASFRL

SEQ ID NO: 27013 - protein, 9 aa, Severe acute respiratory syndrome coronavirus 2
  REGION 1..9: note = Table C
YFIASFRLF

SEQ ID NO: 27014 - protein, 9 aa, Severe acute respiratory syndrome coronavirus 2
  REGION 1..9: note = Table C
IASFRLFAR

SEQ ID NO: 27015 - protein, 9 aa, Severe acute respiratory syndrome coronavirus 2
  REGION 1..9: note = Table C
ASFRLFART

SEQ ID NO: 27016 - protein, 9 aa, Severe acute respiratory syndrome coronavirus 2
  REGION 1..9: note = Table C
SFRLFARTR

SEQ ID NO: 27017 - protein, 9 aa, Severe acute respiratory syndrome coronavirus 2
  REGION 1..9: note = Table C
RLFARTRSM

SEQ ID NO: 27018 - protein, 9 aa, Severe acute respiratory syndrome coronavirus 2
  REGION 1..9: note = Table C
LFARTRSMW

SEQ ID NO: 27019 - protein, 9 aa, Severe acute respiratory syndrome coronavirus 2
  REGION 1..9: note = Table C
ARTRSMWSF

SEQ ID NO: 27020 - protein, 9 aa, Severe acute respiratory syndrome coronavirus 2
  REGION 1..9: note = Table C
SMWSFNPET

SEQ ID NO: 27021 - protein, 9 aa, Severe acute respiratory syndrome coronavirus 2
  REGION 1..9: note = Table C
SFNPETNIL

SEQ ID NO: 27022 - protein, 9 aa, Severe acute respiratory syndrome coronavirus 2
  REGION 1..9: note = Table C
PETNILLNV

SEQ ID NO: 27023 - protein, 9 aa, Severe acute respiratory syndrome coronavirus 2
  REGION 1..9: note = Table C
ILLNVPLHG

SEQ ID NO: 27024 - protein, 9 aa, Severe acute respiratory syndrome coronavirus 2
  REGION 1..9: note = Table C
LLNVPLHGT

SEQ ID NO: 27025 - protein, 9 aa, Severe acute respiratory syndrome coronavirus 2
  REGION 1..9: note = Table C
NVPLHGTIL

SEQ ID NO: 27026 - protein, 9 aa, Severe acute respiratory syndrome coronavirus 2
  REGION 1..9: note = Table C
VPLHGTILT

SEQ ID NO: 27027 - protein, 9 aa, Severe acute respiratory syndrome coronavirus 2
  REGION 1..9: note = Table C
PLHGTILTR

SEQ ID NO: 27028 - protein, 9 aa, Severe acute respiratory syndrome coronavirus 2
  REGION 1..9: note = Table C
GTILTRPLL

SEQ ID NO: 27029 - protein, 9 aa, Severe acute respiratory syndrome coronavirus 2
  REGION 1..9: note = Table C
TRPLLESEL

SEQ ID NO: 27030 - protein, 9 aa, Severe acute respiratory syndrome coronavirus 2
  REGION 1..9: note = Table C
RPLLESELV

SEQ ID NO: 27031 - protein, 9 aa, Severe acute respiratory syndrome coronavirus 2
  REGION 1..9: note = Table C
TSRTLSYYK

SEQ ID NO: 27032 - protein, 9 aa, Severe acute respiratory syndrome coronavirus 2
  REGION 1..9: note = Table C
SRTLSYYKL

SEQ ID NO: 27033 - protein, 9 aa, Severe acute respiratory syndrome coronavirus 2
  REGION 1..9: note = Table C
RTLSYYKLG

SEQ ID NO: 27034 - protein, 9 aa, Severe acute respiratory syndrome coronavirus 2
  REGION 1..9: note = Table C
YYKLGASQR

SEQ ID NO: 27035 - protein, 9 aa, Severe acute respiratory syndrome coronavirus 2
  REGION 1..9: note = Table C
QRVAGDSGF

SEQ ID NO: 27036 - protein, 9 aa, Severe acute respiratory syndrome coronavirus 2
  REGION 1..9: note = Table C
RVAGDSGFA

SEQ ID NO: 27037 - protein, 9 aa, Severe acute respiratory syndrome coronavirus 2
  REGION 1..9: note = Table C
VAGDSGFAA

SEQ ID NO: 27038 - protein, 9 aa, Severe acute respiratory syndrome coronavirus 2
  REGION 1..9: note = Table C
AGDSGFAAY

SEQ ID NO: 27039 - protein, 9 aa, Severe acute respiratory syndrome coronavirus 2
  REGION 1..9: note = Table C
DSGFAAYSR

SEQ ID NO: 27040 - protein, 9 aa, Severe acute respiratory syndrome coronavirus 2
  REGION 1..9: note = Table C
SGFAAYSRY

SEQ ID NO: 27041 - protein, 9 aa, Severe acute respiratory syndrome coronavirus 2
  REGION 1..9: note = Table C
YSRYRIGNY

SEQ ID NO: 27042 - protein, 10 aa, Severe acute respiratory syndrome coronavirus 2
  REGION 1..10: note = Table C
QFAYANRNRF

SEQ ID NO: 27043 - protein, 10 aa, Severe acute respiratory syndrome coronavirus 2
  REGION 1..10: note = Table C
FAYANRNRFL

SEQ ID NO: 27044 - protein, 10 aa, Severe acute respiratory syndrome coronavirus 2
  REGION 1..10: note = Table C
AYANRNRFLY

SEQ ID NO: 27045 - protein, 10 aa, Severe acute respiratory syndrome coronavirus 2
  REGION 1..10: note = Table C
RFLYIIKLIF

SEQ ID NO: 27046 - protein, 10 aa, Severe acute respiratory syndrome coronavirus 2
  REGION 1..10: note = Table C
FLYIIKLIFL

SEQ ID NO: 27047 - protein, 10 aa, Severe acute respiratory syndrome coronavirus 2
  REGION 1..10: note = Table C
LYIIKLIFLW

SEQ ID NO: 27048 - protein, 10 aa, Severe acute respiratory syndrome coronavirus 2
  REGION 1..10: note = Table C
MWLSYFIASF

SEQ ID NO: 27049 - protein, 10 aa, Severe acute respiratory syndrome coronavirus 2
  REGION 1..10: note = Table C
SYFIASFRLF

SEQ ID NO: 27050 - protein, 10 aa, Severe acute respiratory syndrome coronavirus 2
  REGION 1..10: note = Table C
YFIASFRLFA

SEQ ID NO: 27051 - protein, 10 aa, Severe acute respiratory syndrome coronavirus 2
  REGION 1..10: note = Table C
FIASFRLFAR

SEQ ID NO: 27052 - protein, 10 aa, Severe acute respiratory syndrome coronavirus 2
  REGION 1..10: note = Table C
ASFRLFARTR

SEQ ID NO: 27053 - protein, 10 aa, Severe acute respiratory syndrome coronavirus 2
  REGION 1..10: note = Table C
RLFARTRSMW

SEQ ID NO: 27054 - protein, 10 aa, Severe acute respiratory syndrome coronavirus 2
  REGION 1..10: note = Table C
ILLNVPLHGT

SEQ ID NO: 27055 - protein, 10 aa, Severe acute respiratory syndrome coronavirus 2
  REGION 1..10: note = Table C
VPLHGTILTR

SEQ ID NO: 27056 - protein, 10 aa, Severe acute respiratory syndrome coronavirus 2
  REGION 1..10: note = Table C
LTRPLLESEL

SEQ ID NO: 27057 - protein, 10 aa, Severe acute respiratory syndrome coronavirus 2
  REGION 1..10: note = Table C
RPLLESELVI

SEQ ID NO: 27058 - protein, 10 aa, Severe acute respiratory syndrome coronavirus 2
  REGION 1..10: note = Table C
SYYKLGASQR

SEQ ID NO: 27059 - protein, 10 aa, Severe acute respiratory syndrome coronavirus 2
  REGION 1..10: note = Table C
SQRVAGDSGF

SEQ ID NO: 27060 - protein, 10 aa, Severe acute respiratory syndrome coronavirus 2
  REGION 1..10: note = Table C
RVAGDSGFAA

SEQ ID NO: 27061 - protein, 10 aa, Severe acute respiratory syndrome coronavirus 2
  REGION 1..10: note = Table C
VAGDSGFAAY

SEQ ID NO: 27062 - protein, 10 aa, Severe acute respiratory syndrome coronavirus 2
  REGION 1..10: note = Table C
GDSGFAAYSR

SEQ ID NO: 27063 - protein, 10 aa, Severe acute respiratory syndrome coronavirus 2
  REGION 1..10: note = Table C
DSGFAAYSRY

SEQ ID NO: 27064 - protein, 10 aa, Severe acute respiratory syndrome coronavirus 2
  REGION 1..10: note = Table C
AYSRYRIGNY

SEQ ID NO: 27065 - protein, 11 aa, Severe acute respiratory syndrome coronavirus 2
  REGION 1..11: note = Table C
LLQFAYANRNR

SEQ ID NO: 27066 - protein, 11 aa, Severe acute respiratory syndrome coronavirus 2
  REGION 1..11: note = Table C
FAYANRNRFLY

SEQ ID NO: 27067 - protein, 11 aa, Severe acute respiratory syndrome coronavirus 2
  REGION 1..11: note = Table C
AYANRNRFLYI

SEQ ID NO: 27068 - protein, 11 aa, Severe acute respiratory syndrome coronavirus 2
  REGION 1..11: note = Table C
LSYFIASFRLF

SEQ ID NO: 27069 - protein, 11 aa, Severe acute respiratory syndrome coronavirus 2
  REGION 1..11: note = Table C
SMWSFNPETNI

SEQ ID NO: 27070 - protein, 11 aa, Severe acute respiratory syndrome coronavirus 2
  REGION 1..11: note = Table C
WSFNPETNILL

SEQ ID NO: 27071 - protein, 11 aa, Severe acute respiratory syndrome coronavirus 2
  REGION 1..11: note = Table C
NVPLHGTILTR

SEQ ID NO: 27072 - protein, 11 aa, Severe acute respiratory syndrome coronavirus 2
  REGION 1..11: note = Table C
LSYYKLGASQR

SEQ ID NO: 27073 - protein, 11 aa, Severe acute respiratory syndrome coronavirus 2
  REGION 1..11: note = Table C
ASQRVAGDSGF

SEQ ID NO: 27074 - protein, 11 aa, Severe acute respiratory syndrome coronavirus 2
  REGION 1..11: note = Table C
QRVAGDSGFAA

SEQ ID NO: 27075 - protein, 11 aa, Severe acute respiratory syndrome coronavirus 2
  REGION 1..11: note = Table C
RVAGDSGFAAY

SEQ ID NO: 27076 - protein, 11 aa, Severe acute respiratory syndrome coronavirus 2
  REGION 1..11: note = Table C
GDSGFAAYSRY

SEQ ID NO: 27077 - protein, 11 aa, Severe acute respiratory syndrome coronavirus 2
  REGION 1..11: note = Table C
DSGFAAYSRYR

SEQ ID NO: 27078 - protein, 11 aa, Severe acute respiratory syndrome coronavirus 2
  REGION 1..11: note = Table C
AAYSRYRIGNY

SEQ ID NO: 27079 - protein, 8 aa, Severe acute respiratory syndrome coronavirus 2
  REGION 1..8: note = Table C
SPDDQIGY

SEQ ID NO: 27080 - protein, 8 aa, Severe acute respiratory syndrome coronavirus 2
  REGION 1..8: note = Table C
PDDQIGYY

SEQ ID NO: 27081 - protein, 8 aa, Severe acute respiratory syndrome coronavirus 2
  REGION 1..8: note = Table C
DDQIGYYR

SEQ ID NO: 27082 - protein, 8 aa, Severe acute respiratory syndrome coronavirus 2
  REGION 1..8: note = Table C
NAAIVLQL

SEQ ID NO: 27083 - protein, 8 aa, Severe acute respiratory syndrome coronavirus 2
  REGION 1..8: note = Table C
QLPQGTTL

SEQ ID NO: 27084 - protein, 8 aa, Severe acute respiratory syndrome coronavirus 2
  REGION 1..8: note = Table C
PQGTTLPK

SEQ ID NO: 27085 - protein, 8 aa, Severe acute respiratory syndrome coronavirus 2
  REGION 1..8: note = Table C
TATKAYNV

SEQ ID NO: 27086 - protein, 8 aa, Severe acute respiratory syndrome coronavirus 2
  REGION 1..8: note = Table C
AYNVTQAF

SEQ ID NO: 27087 - protein, 8 aa, Severe acute respiratory syndrome coronavirus 2
  REGION 1..8: note = Table C
NVTQAFGR

SEQ ID NO: 27088 - protein, 8 aa, Severe acute respiratory syndrome coronavirus 2
  REGION 1..8: note = Table C
FAPSASAF

SEQ ID NO: 27089 - protein, 8 aa, Severe acute respiratory syndrome coronavirus 2
  REGION 1..8: note = Table C
APSASAFF

SEQ ID NO: 27090 - protein, 8 aa, Severe acute respiratory syndrome coronavirus 2
  REGION 1..8: note = Table C
SAFFGMSR

SEQ ID NO: 27091 - protein, 8 aa, Severe acute respiratory syndrome coronavirus 2
  REGION 1..8: note = Table C
AFFGMSRI

SEQ ID NO: 27092 - protein, 8 aa, Severe acute respiratory syndrome coronavirus 2
  REGION 1..8: note = Table C
FGMSRIGM

SEQ ID NO: 27093 - protein, 8 aa, Severe acute respiratory syndrome coronavirus 2
  REGION 1..8: note = Table C
MSRIGMEV

SEQ ID NO: 27094 - protein, 8 aa, Severe acute respiratory syndrome coronavirus 2
  REGION 1..8: note = Table C
EVTPSGTW

SEQ ID NO: 27095 - protein, 8 aa, Severe acute respiratory syndrome coronavirus 2
  REGION 1..8: note = Table C
VTPSGTWL

SEQ ID NO: 27096 - protein, 8 aa, Severe acute respiratory syndrome coronavirus 2
  REGION 1..8: note = Table C
TYTGAIKL

SEQ ID NO: 27097 - protein, 8 aa, Severe acute respiratory syndrome coronavirus 2
  REGION 1..8: note = Table C
LNKHIDAY

SEQ ID NO: 27098 - protein, 8 aa, Severe acute respiratory syndrome coronavirus 2
  REGION 1..8: note = Table C
KTFPPTEP

SEQ ID NO: 27099 - protein, 8 aa, Severe acute respiratory syndrome coronavirus 2
  REGION 1..8: note = Table C
KADETQAL

SEQ ID NO: 27100 - protein, 8 aa, Severe acute respiratory syndrome coronavirus 2
  REGION 1..8: note = Table C
ETQALPQR

SEQ ID NO: 27101 - protein, 8 aa, Severe acute respiratory syndrome coronavirus 2
  REGION 1..8: note = Table C
QALPQRQK

SEQ ID NO: 27102 - protein, 8 aa, Severe acute respiratory syndrome coronavirus 2
  REGION 1..8: note = Table C
RQKKQQTV

SEQ ID NO: 27103 - protein, 9 aa, Severe acute respiratory syndrome coronavirus 2
  REGION 1..9: note = Table C
SPDDQIGYY

SEQ ID NO: 27104 - protein, 9 aa, Severe acute respiratory syndrome coronavirus 2
  REGION 1..9: note = Table C
DDQIGYYRR

SEQ ID NO: 27105 - protein, 9 aa, Severe acute respiratory syndrome coronavirus 2
  REGION 1..9: note = Table C
PANNAAIVL

SEQ ID NO: 27106 - protein, 9 aa, Severe acute respiratory syndrome coronavirus 2
  REGION 1..9: note = Table C
NNAAIVLQL

SEQ ID NO: 27107 - protein, 9 aa, Severe acute respiratory syndrome coronavirus 2
  REGION 1..9: note = Table C
LQLPQGTTL

SEQ ID NO: 27108 - protein, 9 aa, Severe acute respiratory syndrome coronavirus 2
  REGION 1..9: note = Table C
LPQGTTLPK

SEQ ID NO: 27109 - protein, 9 aa, Severe acute respiratory syndrome coronavirus 2
  REGION 1..9: note = Table C
GTTLPKGFY

SEQ ID NO: 27110 - protein, 9 aa, Severe acute respiratory syndrome coronavirus 2
  REGION 1..9: note = Table C
TTLPKGFYA

SEQ ID NO: 27111 - protein, 9 aa, Severe acute respiratory syndrome coronavirus 2
  REGION 1..9: note = Table C
LPKGFYAEG

SEQ ID NO: 27112 - protein, 9 aa, Severe acute respiratory syndrome coronavirus 2
  REGION 1..9: note = Table C
QKRTATKAY

SEQ ID NO: 27113 - protein, 9 aa, Severe acute respiratory syndrome coronavirus 2
  REGION 1..9: note = Table C
RTATKAYNV

SEQ ID NO: 27114 - protein, 9 aa, Severe acute respiratory syndrome coronavirus 2
  REGION 1..9: note = Table C
ATKAYNVTQ

SEQ ID NO: 27115 - protein, 9 aa, Severe acute respiratory syndrome coronavirus 2
  REGION 1..9: note = Table C
TKAYNVTQA

SEQ ID NO: 27116 - protein, 9 aa, Severe acute respiratory syndrome coronavirus 2
  REGION 1..9: note = Table C
KAYNVTQAF

SEQ ID NO: 27117 - protein, 9 aa, Severe acute respiratory syndrome coronavirus 2
  REGION 1..9: note = Table C
YNVTQAFGR

SEQ ID NO: 27118 - protein, 9 aa, Severe acute respiratory syndrome coronavirus 2
  REGION 1..9: note = Table C
NVTQAFGRR

SEQ ID NO: 27119 - protein, 9 aa, Severe acute respiratory syndrome coronavirus 2
  REGION 1..9: note = Table C
QIAQFAPSA

SEQ ID NO: 27120 - protein, 9 aa, Severe acute respiratory syndrome coronavirus 2
  REGION 1..9: note = Table C
AQFAPSASA

SEQ ID NO: 27121 - protein, 9 aa, Severe acute respiratory syndrome coronavirus 2
  REGION 1..9: note = Table C
QFAPSASAF

SEQ ID NO: 27122 - protein, 9 aa, Severe acute respiratory syndrome coronavirus 2
  REGION 1..9: note = Table C
FAPSASAFF

SEQ ID NO: 27123 - protein, 9 aa, Severe acute respiratory syndrome coronavirus 2
  REGION 1..9: note = Table C
ASAFFGMSR

SEQ ID NO: 27124 - protein, 9 aa, Severe acute respiratory syndrome coronavirus 2
  REGION 1..9: note = Table C
SAFFGMSRI

SEQ ID NO: 27125 - protein, 9 aa, Severe acute respiratory syndrome coronavirus 2
  REGION 1..9: note = Table C
FFGMSRIGM

SEQ ID NO: 27126 - protein, 9 aa, Severe acute respiratory syndrome coronavirus 2
  REGION 1..9: note = Table C
GMSRIGMEV

SEQ ID NO: 27127 - protein, 9 aa, Severe acute respiratory syndrome coronavirus 2
  REGION 1..9: note = Table C
SRIGMEVTP

SEQ ID NO: 27128 - protein, 9 aa, Severe acute respiratory syndrome coronavirus 2
  REGION 1..9: note = Table C
MEVTPSGTW

SEQ ID NO: 27129 - protein, 9 aa, Severe acute respiratory syndrome coronavirus 2
  REGION 1..9: note = Table C
EVTPSGTWL

SEQ ID NO: 27130 - protein, 9 aa, Severe acute respiratory syndrome coronavirus 2
  REGION 1..9: note = Table C
TPSGTWLTY

SEQ ID NO: 27131 - protein, 9 aa, Severe acute respiratory syndrome coronavirus 2
  REGION 1..9: note = Table C
LTYTGAIKL

SEQ ID NO: 27132 - protein, 9 aa, Severe acute respiratory syndrome coronavirus 2
  REGION 1..9: note = Table C
LLNKHIDAY

SEQ ID NO: 27133 - protein, 9 aa, Severe acute respiratory syndrome coronavirus 2
  REGION 1..9: note = Table C
KHIDAYKTF

SEQ ID NO: 27134 - protein, 9 aa, Severe acute respiratory syndrome coronavirus 2
  REGION 1..9: note = Table C
KTFPPTEPK

SEQ ID NO: 27135 - protein, 9 aa, Severe acute respiratory syndrome coronavirus 2
  REGION 1..9: note = Table C
KKADETQAL

SEQ ID NO: 27136 - protein, 9 aa, Severe acute respiratory syndrome coronavirus 2
  REGION 1..9: note = Table C
DETQALPQR

SEQ ID NO: 27137 - protein, 9 aa, Severe acute respiratory syndrome coronavirus 2
  REGION 1..9: note = Table C
ETQALPQRQ

SEQ ID NO: 27138 - protein, 9 aa, Severe acute respiratory syndrome coronavirus 2
  REGION 1..9: note = Table C
TQALPQRQK

SEQ ID NO: 27139 - protein, 9 aa, Severe acute respiratory syndrome coronavirus 2
  REGION 1..9: note = Table C
QALPQRQKK

SEQ ID NO: 27140 - protein, 10 aa, Severe acute respiratory syndrome coronavirus 2
  REGION 1..10: note = Table C
NSSPDDQIGY

SEQ ID NO: 27141 - protein, 10 aa, Severe acute respiratory syndrome coronavirus 2
  REGION 1..10: note = Table C
SSPDDQIGYY

SEQ ID NO: 27142 - protein, 10 aa, Severe acute respiratory syndrome coronavirus 2
  REGION 1..10: note = Table C
SPDDQIGYYR

SEQ ID NO: 27143 - protein, 10 aa, Severe acute respiratory syndrome coronavirus 2
  REGION 1..10: note = Table C
VLQLPQGTTL

SEQ ID NO: 27144 - protein, 10 aa, Severe acute respiratory syndrome coronavirus 2
  REGION 1..10: note = Table C
QLPQGTTLPK

SEQ ID NO: 27145 - protein, 10 aa, Severe acute respiratory syndrome coronavirus 2
  REGION 1..10: note = Table C
QGTTLPKGFY

SEQ ID NO: 27146 - protein, 10 aa, Severe acute respiratory syndrome coronavirus 2
  REGION 1..10: note = Table C
TLPKGFYAEG

SEQ ID NO: 27147 - protein, 10 aa, Severe acute respiratory syndrome coronavirus 2
  REGION 1..10: note = Table C
RQKRTATKAY

SEQ ID NO: 27148 - protein, 10 aa, Severe acute respiratory syndrome coronavirus 2
  REGION 1..10: note = Table C
ATKAYNVTQA

SEQ ID NO: 27149 - protein, 10 aa, Severe acute respiratory syndrome coronavirus 2
  REGION 1..10: note = Table C
TKAYNVTQAF

SEQ ID NO: 27150 - protein, 10 aa, Severe acute respiratory syndrome coronavirus 2
  REGION 1..10: note = Table C
KAYNVTQAFG

SEQ ID NO: 27151 - protein, 10 aa, Severe acute respiratory syndrome coronavirus 2
  REGION 1..10: note = Table C
AYNVTQAFGR

SEQ ID NO: 27152 - protein, 10 aa, Severe acute respiratory syndrome coronavirus 2
  REGION 1..10: note = Table C
YNVTQAFGRR

SEQ ID NO: 27153 - protein, 10 aa, Severe acute respiratory syndrome coronavirus 2
  REGION 1..10: note = Table C
AQFAPSASAF

SEQ ID NO: 27154 - protein, 10 aa, Severe acute respiratory syndrome coronavirus 2
  REGION 1..10: note = Table C
QFAPSASAFF

SEQ ID NO: 27155 - protein, 10 aa, Severe acute respiratory syndrome coronavirus 2
  REGION 1..10: note = Table C
APSASAFFGM

SEQ ID NO: 27156 - protein, 10 aa, Severe acute respiratory syndrome coronavirus 2
  REGION 1..10: note = Table C
SASAFFGMSR

SEQ ID NO: 27157 - protein, 10 aa, Severe acute respiratory syndrome coronavirus 2
  REGION 1..10: note = Table C
AFFGMSRIGM

SEQ ID NO: 27158 - protein, 10 aa, Severe acute respiratory syndrome coronavirus 2
  REGION 1..10: note = Table C
FGMSRIGMEV

SEQ ID NO: 27159 - protein, 10 aa, Severe acute respiratory syndrome coronavirus 2
  REGION 1..10: note = Table C
MEVTPSGTWL

SEQ ID NO: 27160 - protein, 10 aa, Severe acute respiratory syndrome coronavirus 2
  REGION 1..10: note = Table C
VTPSGTWLTY

SEQ ID NO: 27161 - protein, 10 aa, Severe acute respiratory syndrome coronavirus 2
  REGION 1..10: note = Table C
KTFPPTEPKK

SEQ ID NO: 27162 - protein, 10 aa, Severe acute respiratory syndrome coronavirus 2
  REGION 1..10: note = Table C
KADETQALPQ

SEQ ID NO: 27163 - protein, 10 aa, Severe acute respiratory syndrome coronavirus 2
  REGION 1..10: note = Table C
ETQALPQRQK

SEQ ID NO: 27164 - protein, 11 aa, Severe acute respiratory syndrome coronavirus 2
  REGION 1..11: note = Table C
NSSPDDQIGYY

SEQ ID NO: 27165 - protein, 11 aa, Severe acute respiratory syndrome coronavirus 2
  REGION 1..11: note = Table C
SSPDDQIGYYR

SEQ ID NO: 27166 - protein, 11 aa, Severe acute respiratory syndrome coronavirus 2
  REGION 1..11: note = Table C
IVLQLPQGTTL

SEQ ID NO: 27167 - protein, 11 aa, Severe acute respiratory syndrome coronavirus 2
  REGION 1..11: note = Table C
LQLPQGTTLPK

SEQ ID NO: 27168 - protein, 11 aa, Severe acute respiratory syndrome coronavirus 2
  REGION 1..11: note = Table C
TTLPKGFYAEG

SEQ ID NO: 27169 - protein, 11 aa, Severe acute respiratory syndrome coronavirus 2
  REGION 1..11: note = Table C
ATKAYNVTQAF

SEQ ID NO: 27170 - protein, 11 aa, Severe acute respiratory syndrome coronavirus 2
  REGION 1..11: note = Table C
KAYNVTQAFGR

SEQ ID NO: 27171 - protein, 11 aa, Severe acute respiratory syndrome coronavirus 2
  REGION 1..11: note = Table C
WPQIAQFAPSA

SEQ ID NO: 27172 - protein, 11 aa, Severe acute respiratory syndrome coronavirus 2
  REGION 1..11: note = Table C
AQFAPSASAFF

SEQ ID NO: 27173 - protein, 11 aa, Severe acute respiratory syndrome coronavirus 2
  REGION 1..11: note = Table C
GMSRIGMEVTP

SEQ ID NO: 27174 - protein, 11 aa, Severe acute respiratory syndrome coronavirus 2
  REGION 1..11: note = Table C
IGMEVTPSGTW

SEQ ID NO: 27175 - protein, 11 aa, Severe acute respiratory syndrome coronavirus 2
  REGION 1..11: note = Table C
EVTPSGTWLTY

SEQ ID NO: 27176 - protein, 11 aa, Severe acute respiratory syndrome coronavirus 2
  REGION 1..11: note = Table C
AYKTFPPTEPK

SEQ ID NO: 27177 - protein, 11 aa, Severe acute respiratory syndrome coronavirus 2
  REGION 1..11: note = Table C
KADETQALPQR

SEQ ID NO: 27178 - protein, 11 aa, Severe acute respiratory syndrome coronavirus 2
  REGION 1..11: note = Table C
ETQALPQRQKK

SEQ ID NO: 27179 - protein, 11 aa, Severe acute respiratory syndrome coronavirus 2
  REGION 1..11: note = Table C
LPQRQKKQQTV

SEQ ID NO: 27180 - protein, 15 aa, Severe acute respiratory syndrome coronavirus 2
  REGION 1..15: note = Spike Wuhan D614G; S_Wu_1_2; Table D
MFVFLVLLPLVSSQC

SEQ ID NO: 27181 - protein, 15 aa, Severe acute respiratory syndrome coronavirus 2
  REGION 1..15: note = Spike Wuhan D614G; S_Wu_1_2; Table D
LVLLPLVSSQCVNLT

SEQ ID NO: 27182 - protein, 15 aa, Severe acute respiratory syndrome coronavirus 2
  REGION 1..15: note = Spike Wuhan D614G; S_Wu_1_2; Table D
PLVSSQCVNLTTRTQ

SEQ ID NO: 27183 - protein, 15 aa, Severe acute respiratory syndrome coronavirus 2
  REGION 1..15: note = Spike Wuhan D614G; S_Wu_1_2; Table D
SQCVNLTTRTQLPPA

SEQ ID NO: 27184 - protein, 15 aa, Severe acute respiratory syndrome coronavirus 2
  REGION 1..15: note = Spike Wuhan D614G; S_Wu_1_2; Table D
NLTTRTQLPPAYTNS

SEQ ID NO: 27185 - protein, 15 aa, Severe acute respiratory syndrome coronavirus 2
  REGION 1..15: note = Spike Wuhan D614G; S_Wu_1_2; Table D
RTQLPPAYTNSFTRG

SEQ ID NO: 27186 - protein, 15 aa, Severe acute respiratory syndrome coronavirus 2
  REGION 1..15: note = Spike Wuhan D614G; S_Wu_1_2; Table D
PPAYTNSFTRGVYYP

SEQ ID NO: 27187 - protein, 15 aa, Severe acute respiratory syndrome coronavirus 2
  REGION 1..15: note = Spike Wuhan D614G; S_Wu_1_2; Table D
TNSFTRGVYYPDKVF

SEQ ID NO: 27188 - protein, 15 aa, Severe acute respiratory syndrome coronavirus 2
  REGION 1..15: note = Spike Wuhan D614G; S_Wu_1_2; Table D
TRGVYYPDKVFRSSV

SEQ ID NO: 27189 - protein, 15 aa, Severe acute respiratory syndrome coronavirus 2
  REGION 1..15: note = Spike Wuhan D614G; S_Wu_1_2; Table D
YYPDKVFRSSVLHST

SEQ ID NO: 27190 - protein, 15 aa, Severe acute respiratory syndrome coronavirus 2
  REGION 1..15: note = Spike Wuhan D614G; S_Wu_1_2; Table D
KVFRSSVLHSTQDLF

SEQ ID NO: 27191 - protein, 15 aa, Severe acute respiratory syndrome coronavirus 2
  REGION 1..15: note = Spike Wuhan D614G; S_Wu_1_2; Table D
SSVLHSTQDLFLPFF

SEQ ID NO: 27192 - protein, 15 aa, Severe acute respiratory syndrome coronavirus 2
  REGION 1..15: note = Spike Wuhan D614G; S_Wu_1_2; Table D
HSTQDLFLPFFSNVT

SEQ ID NO: 27193 - protein, 15 aa, Severe acute respiratory syndrome coronavirus 2
  REGION 1..15: note = Spike Wuhan D614G; S_Wu_1_2; Table D
DLFLPFFSNVTWFHA

SEQ ID NO: 27194 - protein, 15 aa, Severe acute respiratory syndrome coronavirus 2
  REGION 1..15: note = Spike Wuhan D614G; S_Wu_1_2; Table D
PFFSNVTWFHAIHVS

SEQ ID NO: 27195 - protein, 15 aa, Severe acute respiratory syndrome coronavirus 2
  REGION 1..15: note = Spike Wuhan D614G; S_Wu_1_2; Table D
NVTWFHAIHVSGTNG

SEQ ID NO: 27196 - protein, 15 aa, Severe acute respiratory syndrome coronavirus 2
  REGION 1..15: note = Spike Wuhan D614G; S_Wu_1_2; Table D
FHAIHVSGTNGTKRF

SEQ ID NO: 27197 - protein, 15 aa, Severe acute respiratory syndrome coronavirus 2
  REGION 1..15: note = Spike Wuhan D614G; S_Wu_1_2; Table D
HVSGTNGTKRFDNPV

SEQ ID NO: 27198 - protein, 15 aa, Severe acute respiratory syndrome coronavirus 2
  REGION 1..15: note = Spike Wuhan D614G; S_Wu_1_2; Table D
TNGTKRFDNPVLPFN

SEQ ID NO: 27199 - protein, 15 aa, Severe acute respiratory syndrome coronavirus 2
  REGION 1..15: note = Spike Wuhan D614G; S_Wu_1_2; Table D
KRFDNPVLPFNDGVY

SEQ ID NO: 27200 - protein, 15 aa, Severe acute respiratory syndrome coronavirus 2
  REGION 1..15: note = Spike Wuhan D614G; S_Wu_1_2; Table D
NPVLPFNDGVYFAST

SEQ ID NO: 27201 - protein, 15 aa, Severe acute respiratory syndrome coronavirus 2
  REGION 1..15: note = Spike Wuhan D614G; S_Wu_1_2; Table D
PFNDGVYFASTEKSN

SEQ ID NO: 27202 - protein, 15 aa, Severe acute respiratory syndrome coronavirus 2
  REGION 1..15: note = Spike Wuhan D614G; S_Wu_1_2; Table D
GVYFASTEKSNIIRG

SEQ ID NO: 27203 - protein, 15 aa, Severe acute respiratory syndrome coronavirus 2
  REGION 1..15: note = Spike Wuhan D614G; S_Wu_1_2; Table D
ASTEKSNIIRGWIFG

SEQ ID NO: 27204 - protein, 15 aa, Severe acute respiratory syndrome coronavirus 2
  REGION 1..15: note = Spike Wuhan D614G; S_Wu_1_2; Table D
KSNIIRGWIFGTTLD

SEQ ID NO: 27205 - protein, 15 aa, Severe acute respiratory syndrome coronavirus 2
  REGION 1..15: note = Spike Wuhan D614G; S_Wu_1_2; Table D
IRGWIFGTTLDSKTQ

SEQ ID NO: 27206 - protein, 15 aa, Severe acute respiratory syndrome coronavirus 2
  REGION 1..15: note = Spike Wuhan D614G; S_Wu_1_2; Table D
IFGTTLDSKTQSLLI

SEQ ID NO: 27207 - protein, 15 aa, Severe acute respiratory syndrome coronavirus 2
  REGION 1..15: note = Spike Wuhan D614G; S_Wu_1_2; Table D
TLDSKTQSLLIVNNA

SEQ ID NO: 27208 - protein, 15 aa, Severe acute respiratory syndrome coronavirus 2
  REGION 1..15: note = Spike Wuhan D614G; S_Wu_1_2; Table D
KTQSLLIVNNATNVV

SEQ ID NO: 27209 - protein, 15 aa, Severe acute respiratory syndrome coronavirus 2
  REGION 1..15: note = Spike Wuhan D614G; S_Wu_1_2; Table D
LLIVNNATNVVIKVC

SEQ ID NO: 27210 - protein, 15 aa, Severe acute respiratory syndrome coronavirus 2
  REGION 1..15: note = Spike Wuhan D614G; S_Wu_1_2; Table D
NNATNVVIKVCEFQF

SEQ ID NO: 27211 - protein, 15 aa, Severe acute respiratory syndrome coronavirus 2
  REGION 1..15: note = Spike Wuhan D614G; S_Wu_1_2; Table D
NVVIKVCEFQFCNDP

SEQ ID NO: 27212 - protein, 15 aa, Severe acute respiratory syndrome coronavirus 2
  REGION 1..15: note = Spike Wuhan D614G; S_Wu_1_2; Table D
KVCEFQFCNDPFLGV

SEQ ID NO: 27213 - protein, 15 aa, Severe acute respiratory syndrome coronavirus 2
  REGION 1..15: note = Spike Wuhan D614G; S_Wu_1_2; Table D
FQFCNDPFLGVYYHK

SEQ ID NO: 27214 - protein, 15 aa, Severe acute respiratory syndrome coronavirus 2
  REGION 1..15: note = Spike Wuhan D614G; S_Wu_1_2; Table D
NDPFLGVYYHKNNKS

SEQ ID NO: 27215 - protein, 15 aa, Severe acute respiratory syndrome coronavirus 2
  REGION 1..15: note = Spike Wuhan D614G; S_Wu_1_2; Table D
LGVYYHKNNKSWMES

SEQ ID NO: 27216 - protein, 15 aa, Severe acute respiratory syndrome coronavirus 2
  REGION 1..15: note = Spike Wuhan D614G; S_Wu_1_2; Table D
YHKNNKSWMESEFRV

SEQ ID NO: 27217 - protein, 15 aa, Severe acute respiratory syndrome coronavirus 2
  REGION 1..15: note = Spike Wuhan D614G; S_Wu_1_2; Table D
NKSWMESEFRVYSSA

SEQ ID NO: 27218 - protein, 15 aa, Severe acute respiratory syndrome coronavirus 2
  REGION 1..15: note = Spike Wuhan D614G; S_Wu_1_2; Table D
MESEFRVYSSANNCT

SEQ ID NO: 27219 - protein, 15 aa, Severe acute respiratory syndrome coronavirus 2
  REGION 1..15: note = Spike Wuhan D614G; S_Wu_1_2; Table D
FRVYSSANNCTFEYV

SEQ ID NO: 27220 - protein, 15 aa, Severe acute respiratory syndrome coronavirus 2
  REGION 1..15: note = Spike Wuhan D614G; S_Wu_1_2; Table D
SSANNCTFEYVSQPF

SEQ ID NO: 27221 - protein, 15 aa, Severe acute respiratory syndrome coronavirus 2
  REGION 1..15: note = Spike Wuhan D614G; S_Wu_1_2; Table D
NCTFEYVSQPFLMDL

SEQ ID NO: 27222 - protein, 15 aa, Severe acute respiratory syndrome coronavirus 2
  REGION 1..15: note = Spike Wuhan D614G; S_Wu_1_2; Table D
EYVSQPFLMDLEGKQ

SEQ ID NO: 27223 - protein, 15 aa, Severe acute respiratory syndrome coronavirus 2
  REGION 1..15: note = Spike Wuhan D614G; S_Wu_1_2; Table D
QPFLMDLEGKQGNFK

SEQ ID NO: 27224 - protein, 15 aa, Severe acute respiratory syndrome coronavirus 2
  REGION 1..15: note = Spike Wuhan D614G; S_Wu_1_2; Table D
MDLEGKQGNFKNLRE

SEQ ID NO: 27225 - protein, 15 aa, Severe acute respiratory syndrome coronavirus 2
  REGION 1..15: note = Spike Wuhan D614G; S_Wu_1_2; Table D
GKQGNFKNLREFVFK

SEQ ID NO: 27226 - protein, 15 aa, Severe acute respiratory syndrome coronavirus 2
  REGION 1..15: note = Spike Wuhan D614G; S_Wu_1_2; Table D
NFKNLREFVFKNIDG

SEQ ID NO: 27227 - protein, 15 aa, Severe acute respiratory syndrome coronavirus 2
  REGION 1..15: note = Spike Wuhan D614G; S_Wu_1_2; Table D
LREFVFKNIDGYFKI

SEQ ID NO: 27228 - protein, 15 aa, Severe acute respiratory syndrome coronavirus 2
  REGION 1..15: note = Spike Wuhan D614G; S_Wu_1_2; Table D
VFKNIDGYFKIYSKH

SEQ ID NO: 27229 - protein, 15 aa, Severe acute respiratory syndrome coronavirus 2
  REGION 1..15: note = Spike Wuhan D614G; S_Wu_1_2; Table D
IDGYFKIYSKHTPIN

SEQ ID NO: 27230 - protein, 15 aa, Severe acute respiratory syndrome coronavirus 2
  REGION 1..15: note = Spike Wuhan D614G; S_Wu_1_2; Table D
FKIYSKHTPINLVRD

SEQ ID NO: 27231 - protein, 15 aa, Severe acute respiratory syndrome coronavirus 2
  REGION 1..15: note = Spike Wuhan D614G; S_Wu_1_2; Table D
SKHTPINLVRDLPQG

SEQ ID NO: 27232 - protein, 15 aa, Severe acute respiratory syndrome coronavirus 2
  REGION 1..15: note = Spike Wuhan D614G; S_Wu_1_2; Table D
PINLVRDLPQGFSAL

SEQ ID NO: 27233 - protein, 15 aa, Severe acute respiratory syndrome coronavirus 2
  REGION 1..15: note = Spike Wuhan D614G; S_Wu_1_2; Table D
VRDLPQGFSALEPLV

SEQ ID NO: 27234 - protein, 15 aa, Severe acute respiratory syndrome coronavirus 2
  REGION 1..15: note = Spike Wuhan D614G; S_Wu_1_2; Table D
PQGFSALEPLVDLPI

SEQ ID NO: 27235 - protein, 15 aa, Severe acute respiratory syndrome coronavirus 2
  REGION 1..15: note = Spike Wuhan D614G; S_Wu_1_2; Table D
SALEPLVDLPIGINI

SEQ ID NO: 27236 - protein, 15 aa, Severe acute respiratory syndrome coronavirus 2
  REGION 1..15: note = Spike Wuhan D614G; S_Wu_1_2; Table D
PLVDLPIGINITRFQ

SEQ ID NO: 27237 - protein, 15 aa, Severe acute respiratory syndrome coronavirus 2
  REGION 1..15: note = Spike Wuhan D614G; S_Wu_1_2; Table D
LPIGINITRFQTLLA

SEQ ID NO: 27238 - protein, 15 aa, Severe acute respiratory syndrome coronavirus 2
  REGION 1..15: note = Spike Wuhan D614G; S_Wu_1_2; Table D
INITRFQTLLALHRS

SEQ ID NO: 27239 - protein, 15 aa, Severe acute respiratory syndrome coronavirus 2
  REGION 1..15: note = Spike Wuhan D614G; S_Wu_1_2; Table D
RFQTLLALHRSYLTP

SEQ ID NO: 27240 - protein, 15 aa, Severe acute respiratory syndrome coronavirus 2
  REGION 1..15: note = Spike Wuhan D614G; S_Wu_1_2; Table D
LLALHRSYLTPGDSS

SEQ ID NO: 27241 - protein, 15 aa, Severe acute respiratory syndrome coronavirus 2
  REGION 1..15: note = Spike Wuhan D614G; S_Wu_1_2; Table D
HRSYLTPGDSSSGWT

SEQ ID NO: 27242 - protein, 15 aa, Severe acute respiratory syndrome coronavirus 2
  REGION 1..15: note = Spike Wuhan D614G; S_Wu_1_2; Table D
LTPGDSSSGWTAGAA

SEQ ID NO: 27243 - protein, 15 aa, Severe acute respiratory syndrome coronavirus 2
  REGION 1..15: note = Spike Wuhan D614G; S_Wu_1_2; Table D
DSSSGWTAGAAAYYV

SEQ ID NO: 27244 - protein, 15 aa, Severe acute respiratory syndrome coronavirus 2
  REGION 1..15: note = Spike Wuhan D614G; S_Wu_1_2; Table D
GWTAGAAAYYVGYLQ

SEQ ID NO: 27245 - protein, 15 aa, Severe acute respiratory syndrome coronavirus 2
  REGION 1..15: note = Spike Wuhan D614G; S_Wu_1_2; Table D
GAAAYYVGYLQPRTF

SEQ ID NO: 27246 - protein, 15 aa, Severe acute respiratory syndrome coronavirus 2
  REGION 1..15: note = Spike Wuhan D614G; S_Wu_1_2; Table D
YYVGYLQPRTFLLKY

SEQ ID NO: 27247 - protein, 15 aa, Severe acute respiratory syndrome coronavirus 2
  REGION 1..15: note = Spike Wuhan D614G; S_Wu_1_2; Table D
YLQPRTFLLKYNENG

SEQ ID NO: 27248 - protein, 15 aa, Severe acute respiratory syndrome coronavirus 2
  REGION 1..15: note = Spike Wuhan D614G; S_Wu_1_2; Table D
RTFLLKYNENGTITD

SEQ ID NO: 27249 - protein, 15 aa, Severe acute respiratory syndrome coronavirus 2
  REGION 1..15: note = Spike Wuhan D614G; S_Wu_1_2; Table D
LKYNENGTITDAVDC

SEQ ID NO: 27250 - protein, 15 aa, Severe acute respiratory syndrome coronavirus 2
  REGION 1..15: note = Spike Wuhan D614G; S_Wu_1_2; Table D
ENGTITDAVDCALDP

SEQ ID NO: 27251 - protein, 15 aa, Severe acute respiratory syndrome coronavirus 2
  REGION 1..15: note = Spike Wuhan D614G; S_Wu_1_2; Table D
ITDAVDCALDPLSET

SEQ ID NO: 27252 - protein, 15 aa, Severe acute respiratory syndrome coronavirus 2
  REGION 1..15: note = Spike Wuhan D614G; S_Wu_1_2; Table D
VDCALDPLSETKCTL

SEQ ID NO: 27253 - protein, 15 aa, Severe acute respiratory syndrome coronavirus 2
  REGION 1..15: note = Spike Wuhan D614G; S_Wu_1_2; Table D
LDPLSETKCTLKSFT

SEQ ID NO: 27254 - protein, 15 aa, Severe acute respiratory syndrome coronavirus 2
  REGION 1..15: note = Spike Wuhan D614G; S_Wu_1_2; Table D
SETKCTLKSFTVEKG

SEQ ID NO: 27255 - protein, 15 aa, Severe acute respiratory syndrome coronavirus 2
  REGION 1..15: note = Spike Wuhan D614G; S_Wu_1_2; Table D
CTLKSFTVEKGIYQT

SEQ ID NO: 27256 - protein, 15 aa, Severe acute respiratory syndrome coronavirus 2
  REGION 1..15: note = Spike Wuhan D614G; S_Wu_1_2; Table D
SFTVEKGIYQTSNFR

SEQ ID NO: 27257 - protein, 15 aa, Severe acute respiratory syndrome coronavirus 2
  REGION 1..15: note = Spike Wuhan D614G; S_Wu_1_2; Table D
EKGIYQTSNFRVQPT

SEQ ID NO: 27258 - protein, 15 aa, Severe acute respiratory syndrome coronavirus 2
  REGION 1..15: note = Spike Wuhan D614G; S_Wu_1_2; Table D
YQTSNFRVQPTESIV

SEQ ID NO: 27259 - protein, 15 aa, Severe acute respiratory syndrome coronavirus 2
  REGION 1..15: note = Spike Wuhan D614G; S_Wu_1_2; Table D
NFRVQPTESIVRFPN

SEQ ID NO: 27260 - protein, 15 aa, Severe acute respiratory syndrome coronavirus 2
  REGION 1..15: note = Spike Wuhan D614G; S_Wu_3_4; Table D
QPTESIVRFPNITNL

SEQ ID NO: 27261 - protein, 15 aa, Severe acute respiratory syndrome coronavirus 2
  REGION 1..15: note = Spike Wuhan D614G; S_Wu_3_4; Table D
SIVRFPNITNLCPFG

SEQ ID NO: 27262 - protein, 15 aa, Severe acute respiratory syndrome coronavirus 2
  REGION 1..15: note = Spike Wuhan D614G; S_Wu_3_4; Table D
FPNITNLCPFGEVFN

SEQ ID NO: 27263 - protein, 15 aa, Severe acute respiratory syndrome coronavirus 2
  REGION 1..15: note = Spike Wuhan D614G; S_Wu_3_4; Table D
TNLCPFGEVFNATRF

SEQ ID NO: 27264 - protein, 15 aa, Severe acute respiratory syndrome coronavirus 2
  REGION 1..15: note = Spike Wuhan D614G; S_Wu_3_4; Table D
PFGEVFNATRFASVY

SEQ ID NO: 27265 - protein, 15 aa, Severe acute respiratory syndrome coronavirus 2
  REGION 1..15: note = Spike Wuhan D614G; S_Wu_3_4; Table D
VFNATRFASVYAWNR

SEQ ID NO: 27266 - protein, 15 aa, Severe acute respiratory syndrome coronavirus 2
  REGION 1..15: note = Spike Wuhan D614G; S_Wu_3_4; Table D
TRFASVYAWNRKRIS

SEQ ID NO: 27267 - protein, 15 aa, Severe acute respiratory syndrome coronavirus 2
  REGION 1..15: note = Spike Wuhan D614G; S_Wu_3_4; Table D
SVYAWNRKRISNCVA

SEQ ID NO: 27268 - protein, 15 aa, Severe acute respiratory syndrome coronavirus 2
  REGION 1..15: note = Spike Wuhan D614G; S_Wu_3_4; Table D
WNRKRISNCVADYSV

SEQ ID NO: 27269 - protein, 15 aa, Severe acute respiratory syndrome coronavirus 2
  REGION 1..15: note = Spike Wuhan D614G; S_Wu_3_4; Table D
RISNCVADYSVLYNS

SEQ ID NO: 27270 - protein, 15 aa, Severe acute respiratory syndrome coronavirus 2
  REGION 1..15: note = Spike Wuhan D614G; S_Wu_3_4; Table D
CVADYSVLYNSASFS

SEQ ID NO: 27271 - protein, 15 aa, Severe acute respiratory syndrome coronavirus 2
  REGION 1..15: note = Spike Wuhan D614G; S_Wu_3_4; Table D
YSVLYNSASFSTFKC

SEQ ID NO: 27272 - protein, 15 aa, Severe acute respiratory syndrome coronavirus 2
  REGION 1..15: note = Spike Wuhan D614G; S_Wu_3_4; Table D
YNSASFSTFKCYGVS

SEQ ID NO: 27273 - protein, 15 aa, Severe acute respiratory syndrome coronavirus 2
  REGION 1..15: note = Spike Wuhan D614G; S_Wu_3_4; Table D
SFSTFKCYGVSPTKL

SEQ ID NO: 27274 - protein, 15 aa, Severe acute respiratory syndrome coronavirus 2
  REGION 1..15: note = Spike Wuhan D614G; S_Wu_3_4; Table D
FKCYGVSPTKLNDLC

SEQ ID NO: 27275 - protein, 15 aa, Severe acute respiratory syndrome coronavirus 2
  REGION 1..15: note = Spike Wuhan D614G; S_Wu_3_4; Table D
GVSPTKLNDLCFTNV

SEQ ID NO: 27276 - protein, 15 aa, Severe acute respiratory syndrome coronavirus 2
  REGION 1..15: note = Spike Wuhan D614G; S_Wu_3_4; Table D
TKLNDLCFTNVYADS

SEQ ID NO: 27277 - protein, 15 aa, Severe acute respiratory syndrome coronavirus 2
  REGION 1..15: note = Spike Wuhan D614G; S_Wu_3_4; Table D
DLCFTNVYADSFVIR

SEQ ID NO: 27278 - protein, 15 aa, Severe acute respiratory syndrome coronavirus 2
  REGION 1..15: note = Spike Wuhan D614G; S_Wu_3_4; Table D
TNVYADSFVIRGDEV

SEQ ID NO: 27279 - protein, 15 aa, Severe acute respiratory syndrome coronavirus 2
  REGION 1..15: note = Spike Wuhan D614G; S_Wu_3_4; Table D
ADSFVIRGDEVRQIA

SEQ ID NO: 27280 - protein, 15 aa, Severe acute respiratory syndrome coronavirus 2
  REGION 1..15: note = Spike Wuhan D614G; S_Wu_3_4; Table D
VIRGDEVRQIAPGQT

SEQ ID NO: 27281 - protein, 15 aa, Severe acute respiratory syndrome coronavirus 2
  REGION 1..15: note = Spike Wuhan D614G; S_Wu_3_4; Table D
DEVRQIAPGQTGKIA

SEQ ID NO: 27282 - protein, 15 aa, Severe acute respiratory syndrome coronavirus 2
  REGION 1..15: note = Spike Wuhan D614G; S_Wu_3_4; Table D
QIAPGQTGKIADYNY

SEQ ID NO: 27283 - protein, 15 aa, Severe acute respiratory syndrome coronavirus 2
  REGION 1..15: note = Spike Wuhan D614G; S_Wu_3_4; Table D
GQTGKIADYNYKLPD

SEQ ID NO: 27284 - protein, 15 aa, Severe acute respiratory syndrome coronavirus 2
  REGION 1..15: note = Spike Wuhan D614G; S_Wu_3_4; Table D
KIADYNYKLPDDFTG

SEQ ID NO: 27285 - protein, 15 aa, Severe acute respiratory syndrome coronavirus 2
  REGION 1..15: note = Spike Wuhan D614G; S_Wu_3_4; Table D
YNYKLPDDFTGCVIA

SEQ ID NO: 27286 - protein, 15 aa, Severe acute respiratory syndrome coronavirus 2
  REGION 1..15: note = Spike Wuhan D614G; S_Wu_3_4; Table D
LPDDFTGCVIAWNSN

SEQ ID NO: 27287 - protein, 15 aa, Severe acute respiratory syndrome coronavirus 2
  REGION 1..15: note = Spike Wuhan D614G; S_Wu_3_4; Table D
FTGCVIAWNSNNLDS

SEQ ID NO: 27288 - protein, 15 aa, Severe acute respiratory syndrome coronavirus 2
  REGION 1..15: note = Spike Wuhan D614G; S_Wu_3_4; Table D
VIAWNSNNLDSKVGG

SEQ ID NO: 27289 - protein, 15 aa, Severe acute respiratory syndrome coronavirus 2
  REGION 1..15: note = Spike Wuhan D614G; S_Wu_3_4; Table D
NSNNLDSKVGGNYNY

SEQ ID NO: 27290 - protein, 15 aa, Severe acute respiratory syndrome coronavirus 2
  REGION 1..15: note = Spike Wuhan D614G; S_Wu_3_4; Table D
LDSKVGGNYNYLYRL

SEQ ID NO: 27291 - protein, 15 aa, Severe acute respiratory syndrome coronavirus 2
  REGION 1..15: note = Spike Wuhan D614G; S_Wu_3_4; Table D
VGGNYNYLYRLFRKS

SEQ ID NO: 27292 - protein, 15 aa, Severe acute respiratory syndrome coronavirus 2
  REGION 1..15: note = Spike Wuhan D614G; S_Wu_3_4; Table D
YNYLYRLFRKSNLKP

SEQ ID NO: 27293 - protein, 15 aa, Severe acute respiratory syndrome coronavirus 2
  REGION 1..15: note = Spike Wuhan D614G; S_Wu_3_4; Table D
YRLFRKSNLKPFERD

SEQ ID NO: 27294 - protein, 15 aa, Severe acute respiratory syndrome coronavirus 2
  REGION 1..15: note = Spike Wuhan D614G; S_Wu_3_4; Table D
RKSNLKPFERDISTE

SEQ ID NO: 27295 - protein, 15 aa, Severe acute respiratory syndrome coronavirus 2
  REGION 1..15: note = Spike Wuhan D614G; S_Wu_3_4; Table D
LKPFERDISTEIYQA

SEQ ID NO: 27296 - protein, 15 aa, Severe acute respiratory syndrome coronavirus 2
  REGION 1..15: note = Spike Wuhan D614G; S_Wu_3_4; Table D
ERDISTEIYQAGSTP

SEQ ID NO: 27297 - protein, 15 aa, Severe acute respiratory syndrome coronavirus 2
  REGION 1..15: note = Spike Wuhan D614G; S_Wu_3_4; Table D
STEIYQAGSTPCNGV

SEQ ID NO: 27298 - protein, 15 aa, Severe acute respiratory syndrome coronavirus 2
  REGION 1..15: note = Spike Wuhan D614G; S_Wu_3_4; Table D
YQAGSTPCNGVEGFN

SEQ ID NO: 27299 - protein, 15 aa, Severe acute respiratory syndrome coronavirus 2
  REGION 1..15: note = Spike Wuhan D614G; S_Wu_3_4; Table D
STPCNGVEGFNCYFP

SEQ ID NO: 27300 - protein, 15 aa, Severe acute respiratory syndrome coronavirus 2
  REGION 1..15: note = Spike Wuhan D614G; S_Wu_3_4; Table D
NGVEGFNCYFPLQSY

SEQ ID NO: 27301 - protein, 15 aa, Severe acute respiratory syndrome coronavirus 2
  REGION 1..15: note = Spike Wuhan D614G; S_Wu_3_4; Table D
GFNCYFPLQSYGFQP

SEQ ID NO: 27302 - protein, 15 aa, Severe acute respiratory syndrome coronavirus 2
  REGION 1..15: note = Spike Wuhan D614G; S_Wu_3_4; Table D
YFPLQSYGFQPTNGV

SEQ ID NO: 27303 - protein, 15 aa, Severe acute respiratory syndrome coronavirus 2
  REGION 1..15: note = Spike Wuhan D614G; S_Wu_3_4; Table D
QSYGFQPTNGVGYQP

SEQ ID NO: 27304 - protein, 15 aa, Severe acute respiratory syndrome coronavirus 2
  REGION 1..15: note = Spike Wuhan D614G; S_Wu_3_4; Table D
FQPTNGVGYQPYRVV

SEQ ID NO: 27305 - protein, 15 aa, Severe acute respiratory syndrome coronavirus 2
  REGION 1..15: note = Spike Wuhan D614G; S_Wu_3_4; Table D
NGVGYQPYRVVVLSF

SEQ ID NO: 27306 - protein, 15 aa, Severe acute respiratory syndrome coronavirus 2
  REGION 1..15: note = Spike Wuhan D614G; S_Wu_3_4; Table D
YQPYRVVVLSFELLH

SEQ ID NO: 27307 - protein, 15 aa, Severe acute respiratory syndrome coronavirus 2
  REGION 1..15: note = Spike Wuhan D614G; S_Wu_3_4; Table D
RVVVLSFELLHAPAT

SEQ ID NO: 27308 - protein, 15 aa, Severe acute respiratory syndrome coronavirus 2
  REGION 1..15: note = Spike Wuhan D614G; S_Wu_3_4; Table D
LSFELLHAPATVCGP

SEQ ID NO: 27309 - protein, 15 aa, Severe acute respiratory syndrome coronavirus 2
  REGION 1..15: note = Spike Wuhan D614G; S_Wu_3_4; Table D
LLHAPATVCGPKKST

SEQ ID NO: 27310 - protein, 15 aa, Severe acute respiratory syndrome coronavirus 2
  REGION 1..15: note = Spike Wuhan D614G; S_Wu_3_4; Table D
PATVCGPKKSTNLVK

SEQ ID NO: 27311 - protein, 15 aa, Severe acute respiratory syndrome coronavirus 2
  REGION 1..15: note = Spike Wuhan D614G; S_Wu_3_4; Table D
CGPKKSTNLVKNKCV

SEQ ID NO: 27312 - protein, 15 aa, Severe acute respiratory syndrome coronavirus 2
  REGION 1..15: note = Spike Wuhan D614G; S_Wu_3_4; Table D
KSTNLVKNKCVNFNF

SEQ ID NO: 27313 - protein, 15 aa, Severe acute respiratory syndrome coronavirus 2
  REGION 1..15: note = Spike Wuhan D614G; S_Wu_3_4; Table D
LVKNKCVNFNFNGLT

SEQ ID NO: 27314 - protein, 15 aa, Severe acute respiratory syndrome coronavirus 2
  REGION 1..15: note = Spike Wuhan D614G; S_Wu_3_4; Table D
KCVNFNFNGLTGTGV

SEQ ID NO: 27315 - protein, 15 aa, Severe acute respiratory syndrome coronavirus 2
  REGION 1..15: note = Spike Wuhan D614G; S_Wu_3_4; Table D
FNFNGLTGTGVLTES

SEQ ID NO: 27316 - protein, 15 aa, Severe acute respiratory syndrome coronavirus 2
  REGION 1..15: note = Spike Wuhan D614G; S_Wu_3_4; Table D
GLTGTGVLTESNKKF

SEQ ID NO: 27317 - protein, 15 aa, Severe acute respiratory syndrome coronavirus 2
  REGION 1..15: note = Spike Wuhan D614G; S_Wu_3_4; Table D
TGVLTESNKKFLPFQ

SEQ ID NO: 27318 - protein, 15 aa, Severe acute respiratory syndrome coronavirus 2
  REGION 1..15: note = Spike Wuhan D614G; S_Wu_3_4; Table D
TESNKKFLPFQQFGR

SEQ ID NO: 27319 - protein, 15 aa, Severe acute respiratory syndrome coronavirus 2
  REGION 1..15: note = Spike Wuhan D614G; S_Wu_3_4; Table D
KKFLPFQQFGRDIAD

SEQ ID NO: 27320 - protein, 15 aa, Severe acute respiratory syndrome coronavirus 2
  REGION 1..15: note = Spike Wuhan D614G; S_Wu_3_4; Table D
PFQQFGRDIADTTDA

SEQ ID NO: 27321 - protein, 15 aa, Severe acute respiratory syndrome coronavirus 2
  REGION 1..15: note = Spike Wuhan D614G; S_Wu_3_4; Table D
FGRDIADTTDAVRDP

SEQ ID NO: 27322 - protein, 15 aa, Severe acute respiratory syndrome coronavirus 2
  REGION 1..15: note = Spike Wuhan D614G; S_Wu_3_4; Table D
IADTTDAVRDPQTLE

SEQ ID NO: 27323 - protein, 15 aa, Severe acute respiratory syndrome coronavirus 2
  REGION 1..15: note = Spike Wuhan D614G; S_Wu_3_4; Table D
TDAVRDPQTLEILDI

SEQ ID NO: 27324 - protein, 15 aa, Severe acute respiratory syndrome coronavirus 2
  REGION 1..15: note = Spike Wuhan D614G; S_Wu_3_4; Table D
RDPQTLEILDITPCS

SEQ ID NO: 27325 - protein, 15 aa, Severe acute respiratory syndrome coronavirus 2
  REGION 1..15: note = Spike Wuhan D614G; S_Wu_3_4; Table D
TLEILDITPCSFGGV

SEQ ID NO: 27326 - protein, 15 aa, Severe acute respiratory syndrome coronavirus 2
  REGION 1..15: note = Spike Wuhan D614G; S_Wu_3_4; Table D
LDITPCSFGGVSVIT

SEQ ID NO: 27327 - protein, 15 aa, Severe acute respiratory syndrome coronavirus 2
  REGION 1..15: note = Spike Wuhan D614G; S_Wu_3_4; Table D
PCSFGGVSVITPGTN

SEQ ID NO: 27328 - protein, 15 aa, Severe acute respiratory syndrome coronavirus 2
  REGION 1..15: note = Spike Wuhan D614G; S_Wu_3_4; Table D
GGVSVITPGTNTSNQ

SEQ ID NO: 27329 - protein, 15 aa, Severe acute respiratory syndrome coronavirus 2
  REGION 1..15: note = Spike Wuhan D614G; S_Wu_3_4; Table D
VITPGTNTSNQVAVL

SEQ ID NO: 27330 - protein, 15 aa, Severe acute respiratory syndrome coronavirus 2
  REGION 1..15: note = Spike Wuhan D614G; S_Wu_3_4; Table D
GTNTSNQVAVLYQGV

SEQ ID NO: 27331 - protein, 15 aa, Severe acute respiratory syndrome coronavirus 2
  REGION 1..15: note = Spike Wuhan D614G; S_Wu_3_4; Table D
SNQVAVLYQGVNCTE

SEQ ID NO: 27332 - protein, 15 aa, Severe acute respiratory syndrome coronavirus 2
  REGION 1..15: note = Spike Wuhan D614G; S_Wu_3_4; Table D
AVLYQGVNCTEVPVA

SEQ ID NO: 27333 - protein, 15 aa, Severe acute respiratory syndrome coronavirus 2
  REGION 1..15: note = Spike Wuhan D614G; S_Wu_3_4; Table D
QGVNCTEVPVAIHAD

SEQ ID NO: 27334 - protein, 15 aa, Severe acute respiratory syndrome coronavirus 2
  REGION 1..15: note = Spike Wuhan D614G; S_Wu_3_4; Table D
CTEVPVAIHADQLTP

SEQ ID NO: 27335 - protein, 15 aa, Severe acute respiratory syndrome coronavirus 2
  REGION 1..15: note = Spike Wuhan D614G; S_Wu_3_4; Table D
PVAIHADQLTPTWRV

SEQ ID NO: 27336 - protein, 15 aa, Severe acute respiratory syndrome coronavirus 2
  REGION 1..15: note = Spike Wuhan D614G; S_Wu_3_4; Table D
HADQLTPTWRVYSTG

SEQ ID NO: 27337 - protein, 15 aa, Severe acute respiratory syndrome coronavirus 2
  REGION 1..15: note = Spike Wuhan D614G; S_Wu_3_4; Table D
LTPTWRVYSTGSNVF

SEQ ID NO: 27338 - protein, 15 aa, Severe acute respiratory syndrome coronavirus 2
  REGION 1..15: note = Spike Wuhan D614G; S_Wu_3_4; Table D
WRVYSTGSNVFQTRA

SEQ ID NO: 27339 - protein, 15 aa, Severe acute respiratory syndrome coronavirus 2
  REGION 1..15: note = Spike Wuhan D614G; S_Wu_3_4; Table D
STGSNVFQTRAGCLI

SEQ ID NO: 27340 - protein, 15 aa, Severe acute respiratory syndrome coronavirus 2
  REGION 1..15: note = Spike Wuhan D614G; S_Wu_5_6; Table D
NVFQTRAGCLIGAEH

SEQ ID NO: 27341 - protein, 15 aa, Severe acute respiratory syndrome coronavirus 2
  REGION 1..15: note = Spike Wuhan D614G; S_Wu_5_6; Table D
TRAGCLIGAEHVNNS

SEQ ID NO: 27342 - protein, 15 aa, Severe acute respiratory syndrome coronavirus 2
  REGION 1..15: note = Spike Wuhan D614G; S_Wu_5_6; Table D
CLIGAEHVNNSYECD

SEQ ID NO: 27343 - protein, 15 aa, Severe acute respiratory syndrome coronavirus 2
  REGION 1..15: note = Spike Wuhan D614G; S_Wu_5_6; Table D
AEHVNNSYECDIPIG

SEQ ID NO: 27344 - protein, 15 aa, Severe acute respiratory syndrome coronavirus 2
  REGION 1..15: note = Spike Wuhan D614G; S_Wu_5_6; Table D
NNSYECDIPIGAGIC

SEQ ID NO: 27345 - protein, 15 aa, Severe acute respiratory syndrome coronavirus 2
  REGION 1..15: note = Spike Wuhan D614G; S_Wu_5_6; Table D
ECDIPIGAGICASYQ

SEQ ID NO: 27346 - protein, 15 aa, Severe acute respiratory syndrome coronavirus 2
  REGION 1..15: note = Spike Wuhan D614G; S_Wu_5_6; Table D
PIGAGICASYQTQTN

SEQ ID NO: 27347 - protein, 15 aa, Severe acute respiratory syndrome coronavirus 2
  REGION 1..15: note = Spike Wuhan D614G; S_Wu_5_6; Table D
GICASYQTQTNSPRR

SEQ ID NO: 27348 - protein, 15 aa, Severe acute respiratory syndrome coronavirus 2
  REGION 1..15: note = Spike Wuhan D614G; S_Wu_5_6; Table D
SYQTQTNSPRRARSV

SEQ ID NO: 27349 - protein, 15 aa, Severe acute respiratory syndrome coronavirus 2
  REGION 1..15: note = Spike Wuhan D614G; S_Wu_5_6; Table D
QTNSPRRARSVASQS

SEQ ID NO: 27350 - protein, 15 aa, Severe acute respiratory syndrome coronavirus 2
  REGION 1..15: note = Spike Wuhan D614G; S_Wu_5_6; Table D
PRRARSVASQSIIAY

SEQ ID NO: 27351 - protein, 15 aa, Severe acute respiratory syndrome coronavirus 2
  REGION 1..15: note = Spike Wuhan D614G; S_Wu_5_6; Table D
RSVASQSIIAYTMSL

SEQ ID NO: 27352 - protein, 15 aa, Severe acute respiratory syndrome coronavirus 2
  REGION 1..15: note = Spike Wuhan D614G; S_Wu_5_6; Table D
SQSIIAYTMSLGAEN

SEQ ID NO: 27353 - protein, 15 aa, Severe acute respiratory syndrome coronavirus 2
  REGION 1..15: note = Spike Wuhan D614G; S_Wu_5_6; Table D
IAYTMSLGAENSVAY

SEQ ID NO: 27354 - protein, 15 aa, Severe acute respiratory syndrome coronavirus 2
  REGION 1..15: note = Spike Wuhan D614G; S_Wu_5_6; Table D
MSLGAENSVAYSNNS

SEQ ID NO: 27355 - protein, 15 aa, Severe acute respiratory syndrome coronavirus 2
  REGION 1..15: note = Spike Wuhan D614G; S_Wu_5_6; Table D
AENSVAYSNNSIAIP

SEQ ID NO: 27356 - protein, 15 aa, Severe acute respiratory syndrome coronavirus 2
  REGION 1..15: note = Spike Wuhan D614G; S_Wu_5_6; Table D
VAYSNNSIAIPTNFT

SEQ ID NO: 27357 - protein, 15 aa, Severe acute respiratory syndrome coronavirus 2
  REGION 1..15: note = Spike Wuhan D614G; S_Wu_5_6; Table D
NNSIAIPTNFTISVT

SEQ ID NO: 27358 - protein, 15 aa, Severe acute respiratory syndrome coronavirus 2
  REGION 1..15: note = Spike Wuhan D614G; S_Wu_5_6; Table D
AIPTNFTISVTTEIL

SEQ ID NO: 27359 - protein, 15 aa, Severe acute respiratory syndrome coronavirus 2
  REGION 1..15: note = Spike Wuhan D614G; S_Wu_5_6; Table D
NFTISVTTEILPVSM

SEQ ID NO: 27360 - protein, 15 aa, Severe acute respiratory syndrome coronavirus 2
  REGION 1..15: note = Spike Wuhan D614G; S_Wu_5_6; Table D
SVTTEILPVSMTKTS

SEQ ID NO: 27361 - protein, 15 aa, Severe acute respiratory syndrome coronavirus 2
  REGION 1..15: note = Spike Wuhan D614G; S_Wu_5_6; Table D
EILPVSMTKTSVDCT

SEQ ID NO: 27362 - protein, 15 aa, Severe acute respiratory syndrome coronavirus 2
  REGION 1..15: note = Spike Wuhan D614G; S_Wu_5_6; Table D
VSMTKTSVDCTMYIC

SEQ ID NO: 27363 - protein, 15 aa, Severe acute respiratory syndrome coronavirus 2
  REGION 1..15: note = Spike Wuhan D614G; S_Wu_5_6; Table D
KTSVDCTMYICGDST

SEQ ID NO: 27364 - protein, 15 aa, Severe acute respiratory syndrome coronavirus 2
  REGION 1..15: note = Spike Wuhan D614G; S_Wu_5_6; Table D
DCTMYICGDSTECSN

SEQ ID NO: 27365 - protein, 15 aa, Severe acute respiratory syndrome coronavirus 2
  REGION 1..15: note = Spike Wuhan D614G; S_Wu_5_6; Table D
YICGDSTECSNLLLQ

SEQ ID NO: 27366 - protein, 15 aa, Severe acute respiratory syndrome coronavirus 2
  REGION 1..15: note = Spike Wuhan D614G; S_Wu_5_6; Table D
DSTECSNLLLQYGSF

SEQ ID NO: 27367 - protein, 15 aa, Severe acute respiratory syndrome coronavirus 2
  REGION 1..15: note = Spike Wuhan D614G; S_Wu_5_6; Table D
CSNLLLQYGSFCTQL

SEQ ID NO: 27368 - protein, 15 aa, Severe acute respiratory syndrome coronavirus 2
  REGION 1..15: note = Spike Wuhan D614G; S_Wu_5_6; Table D
LLQYGSFCTQLNRAL

SEQ ID NO: 27369 - protein, 15 aa, Severe acute respiratory syndrome coronavirus 2
  REGION 1..15: note = Spike Wuhan D614G; S_Wu_5_6; Table D
GSFCTQLNRALTGIA

SEQ ID NO: 27370 - protein, 15 aa, Severe acute respiratory syndrome coronavirus 2
  REGION 1..15: note = Spike Wuhan D614G; S_Wu_5_6; Table D
TQLNRALTGIAVEQD

SEQ ID NO: 27371 - protein, 15 aa, Severe acute respiratory syndrome coronavirus 2
  REGION 1..15: note = Spike Wuhan D614G; S_Wu_5_6; Table D
RALTGIAVEQDKNTQ

SEQ ID NO: 27372 - protein, 15 aa, Severe acute respiratory syndrome coronavirus 2
  REGION 1..15: note = Spike Wuhan D614G; S_Wu_5_6; Table D
GIAVEQDKNTQEVFA

SEQ ID NO: 27373 - protein, 15 aa, Severe acute respiratory syndrome coronavirus 2
  REGION 1..15: note = Spike Wuhan D614G; S_Wu_5_6; Table D
EQDKNTQEVFAQVKQ

SEQ ID NO: 27374 - protein, 15 aa, Severe acute respiratory syndrome coronavirus 2
  REGION 1..15: note = Spike Wuhan D614G; S_Wu_5_6; Table D
NTQEVFAQVKQIYKT

SEQ ID NO: 27375 - protein, 15 aa, Severe acute respiratory syndrome coronavirus 2
  REGION 1..15: note = Spike Wuhan D614G; S_Wu_5_6; Table D
VFAQVKQIYKTPPIK

SEQ ID NO: 27376 - protein, 15 aa, Severe acute respiratory syndrome coronavirus 2
  REGION 1..15: note = Spike Wuhan D614G; S_Wu_5_6; Table D
VKQIYKTPPIKDFGG

SEQ ID NO: 27377 - protein, 15 aa, Severe acute respiratory syndrome coronavirus 2
  REGION 1..15: note = Spike Wuhan D614G; S_Wu_5_6; Table D
YKTPPIKDFGGFNFS

SEQ ID NO: 27378 - protein, 15 aa, Severe acute respiratory syndrome coronavirus 2
  REGION 1..15: note = Spike Wuhan D614G; S_Wu_5_6; Table D
PIKDFGGFNFSQILP

SEQ ID NO: 27379 - protein, 15 aa, Severe acute respiratory syndrome coronavirus 2
  REGION 1..15: note = Spike Wuhan D614G; S_Wu_5_6; Table D
FGGFNFSQILPDPSK

SEQ ID NO: 27380 - protein, 15 aa, Severe acute respiratory syndrome coronavirus 2
  REGION 1..15: note = Spike Wuhan D614G; S_Wu_5_6; Table D
NFSQILPDPSKPSKR

SEQ ID NO: 27381 - protein, 15 aa, Severe acute respiratory syndrome coronavirus 2
  REGION 1..15: note = Spike Wuhan D614G; S_Wu_5_6; Table D
ILPDPSKPSKRSFIE

SEQ ID NO: 27382 - protein, 15 aa, Severe acute respiratory syndrome coronavirus 2
  REGION 1..15: note = Spike Wuhan D614G; S_Wu_5_6; Table D
PSKPSKRSFIEDLLF

SEQ ID NO: 27383 - protein, 15 aa, Severe acute respiratory syndrome coronavirus 2
  REGION 1..15: note = Spike Wuhan D614G; S_Wu_5_6; Table D
SKRSFIEDLLFNKVT

SEQ ID NO: 27384 - protein, 15 aa, Severe acute respiratory syndrome coronavirus 2
  REGION 1..15: note = Spike Wuhan D614G; S_Wu_5_6; Table D
FIEDLLFNKVTLADA

SEQ ID NO: 27385 - protein, 15 aa, Severe acute respiratory syndrome coronavirus 2
  REGION 1..15: note = Spike Wuhan D614G; S_Wu_5_6; Table D
LLFNKVTLADAGFIK

SEQ ID NO: 27386 - protein, 15 aa, Severe acute respiratory syndrome coronavirus 2
  REGION 1..15: note = Spike Wuhan D614G; S_Wu_5_6; Table D
KVTLADAGFIKQYGD

SEQ ID NO: 27387 - protein, 15 aa, Severe acute respiratory syndrome coronavirus 2
  REGION 1..15: note = Spike Wuhan D614G; S_Wu_5_6; Table D
ADAGFIKQYGDCLGD

SEQ ID NO: 27388 - protein, 15 aa, Severe acute respiratory syndrome coronavirus 2
  REGION 1..15: note = Spike Wuhan D614G; S_Wu_5_6; Table D
FIKQYGDCLGDIAAR

SEQ ID NO: 27389 - protein, 15 aa, Severe acute respiratory syndrome coronavirus 2
  REGION 1..15: note = Spike Wuhan D614G; S_Wu_5_6; Table D
YGDCLGDIAARDLIC

SEQ ID NO: 27390 - protein, 15 aa, Severe acute respiratory syndrome coronavirus 2
  REGION 1..15: note = Spike Wuhan D614G; S_Wu_5_6; Table D
LGDIAARDLICAQKF

SEQ ID NO: 27391 - protein, 15 aa, Severe acute respiratory syndrome coronavirus 2
  REGION 1..15: note = Spike Wuhan D614G; S_Wu_5_6; Table D
AARDLICAQKFNGLT

SEQ ID NO: 27392 - protein, 15 aa, Severe acute respiratory syndrome coronavirus 2
  REGION 1..15: note = Spike Wuhan D614G; S_Wu_5_6; Table D
LICAQKFNGLTVLPP

SEQ ID NO: 27393 - protein, 15 aa, Severe acute respiratory syndrome coronavirus 2
  REGION 1..15: note = Spike Wuhan D614G; S_Wu_5_6; Table D
QKFNGLTVLPPLLTD

SEQ ID NO: 27394 - protein, 15 aa, Severe acute respiratory syndrome coronavirus 2
  REGION 1..15: note = Spike Wuhan D614G; S_Wu_5_6; Table D
GLTVLPPLLTDEMIA

SEQ ID NO: 27395 - protein, 15 aa, Severe acute respiratory syndrome coronavirus 2
  REGION 1..15: note = Spike Wuhan D614G; S_Wu_5_6; Table D
LPPLLTDEMIAQYTS

SEQ ID NO: 27396 - protein, 15 aa, Severe acute respiratory syndrome coronavirus 2
  REGION 1..15: note = Spike Wuhan D614G; S_Wu_5_6; Table D
LTDEMIAQYTSALLA

SEQ ID NO: 27397 - protein, 15 aa, Severe acute respiratory syndrome coronavirus 2
  REGION 1..15: note = Spike Wuhan D614G; S_Wu_5_6; Table D
MIAQYTSALLAGTIT

SEQ ID NO: 27398 - protein, 15 aa, Severe acute respiratory syndrome coronavirus 2
  REGION 1..15: note = Spike Wuhan D614G; S_Wu_5_6; Table D
YTSALLAGTITSGWT

SEQ ID NO: 27399 - protein, 15 aa, Severe acute respiratory syndrome coronavirus 2
  REGION 1..15: note = Spike Wuhan D614G; S_Wu_5_6; Table D
LLAGTITSGWTFGAG

SEQ ID NO: 27400 - protein, 15 aa, Severe acute respiratory syndrome coronavirus 2
  REGION 1..15: note = Spike Wuhan D614G; S_Wu_5_6; Table D
TITSGWTFGAGAALQ

SEQ ID NO: 27401 - protein, 15 aa, Severe acute respiratory syndrome coronavirus 2
  REGION 1..15: note = Spike Wuhan D614G; S_Wu_5_6; Table D
GWTFGAGAALQIPFA

SEQ ID NO: 27402 - protein, 15 aa, Severe acute respiratory syndrome coronavirus 2
  REGION 1..15: note = Spike Wuhan D614G; S_Wu_5_6; Table D
GAGAALQIPFAMQMA

SEQ ID NO: 27403 - protein, 15 aa, Severe acute respiratory syndrome coronavirus 2
  REGION 1..15: note = Spike Wuhan D614G; S_Wu_5_6; Table D
ALQIPFAMQMAYRFN

SEQ ID NO: 27404 - protein, 15 aa, Severe acute respiratory syndrome coronavirus 2
  REGION 1..15: note = Spike Wuhan D614G; S_Wu_5_6; Table D
PFAMQMAYRFNGIGV

SEQ ID NO: 27405 - protein, 15 aa, Severe acute respiratory syndrome coronavirus 2
  REGION 1..15: note = Spike Wuhan D614G; S_Wu_5_6; Table D
QMAYRFNGIGVTQNV

SEQ ID NO: 27406 - protein, 15 aa, Severe acute respiratory syndrome coronavirus 2
  REGION 1..15: note = Spike Wuhan D614G; S_Wu_5_6; Table D
RFNGIGVTQNVLYEN

SEQ ID NO: 27407 - protein, 15 aa, Severe acute respiratory syndrome coronavirus 2
  REGION 1..15: note = Spike Wuhan D614G; S_Wu_5_6; Table D
IGVTQNVLYENQKLI

SEQ ID NO: 27408 - protein, 15 aa, Severe acute respiratory syndrome coronavirus 2
  REGION 1..15: note = Spike Wuhan D614G; S_Wu_5_6; Table D
QNVLYENQKLIANQF

SEQ ID NO: 27409 - protein, 15 aa, Severe acute respiratory syndrome coronavirus 2
  REGION 1..15: note = Spike Wuhan D614G; S_Wu_5_6; Table D
YENQKLIANQFNSAI

SEQ ID NO: 27410 - protein, 15 aa, Severe acute respiratory syndrome coronavirus 2
  REGION 1..15: note = Spike Wuhan D614G; S_Wu_5_6; Table D
KLIANQFNSAIGKIQ

SEQ ID NO: 27411 - protein, 15 aa, Severe acute respiratory syndrome coronavirus 2
  REGION 1..15: note = Spike Wuhan D614G; S_Wu_5_6; Table D
NQFNSAIGKIQDSLS

SEQ ID NO: 27412 - protein, 15 aa, Severe acute respiratory syndrome coronavirus 2
  REGION 1..15: note = Spike Wuhan D614G; S_Wu_5_6; Table D
SAIGKIQDSLSSTAS

SEQ ID NO: 27413 - protein, 15 aa, Severe acute respiratory syndrome coronavirus 2
  REGION 1..15: note = Spike Wuhan D614G; S_Wu_5_6; Table D
KIQDSLSSTASALGK

SEQ ID NO: 27414 - protein, 15 aa, Severe acute respiratory syndrome coronavirus 2
  REGION 1..15: note = Spike Wuhan D614G; S_Wu_5_6; Table D
SLSSTASALGKLQDV

SEQ ID NO: 27415 - protein, 15 aa, Severe acute respiratory syndrome coronavirus 2
  REGION 1..15: note = Spike Wuhan D614G; S_Wu_5_6; Table D
TASALGKLQDVVNQN

SEQ ID NO: 27416 - protein, 15 aa, Severe acute respiratory syndrome coronavirus 2
  REGION 1..15: note = Spike Wuhan D614G; S_Wu_5_6; Table D
LGKLQDVVNQNAQAL

SEQ ID NO: 27417 - protein, 15 aa, Severe acute respiratory syndrome coronavirus 2
  REGION 1..15: note = Spike Wuhan D614G; S_Wu_5_6; Table D
QDVVNQNAQALNTLV

SEQ ID NO: 27418 - protein, 15 aa, Severe acute respiratory syndrome coronavirus 2
  REGION 1..15: note = Spike Wuhan D614G; S_Wu_5_6; Table D
NQNAQALNTLVKQLS

SEQ ID NO: 27419 - protein, 15 aa, Severe acute respiratory syndrome coronavirus 2
  REGION 1..15: note = Spike Wuhan D614G; S_Wu_5_6; Table D
QALNTLVKQLSSNFG

SEQ ID NO: 27420 - protein, 15 aa, Severe acute respiratory syndrome coronavirus 2
  REGION 1..15: note = Spike Wuhan D614G; S_Wu_7_8; Table D
TLVKQLSSNFGAISS

SEQ ID NO: 27421 - protein, 15 aa, Severe acute respiratory syndrome coronavirus 2
  REGION 1..15: note = Spike Wuhan D614G; S_Wu_7_8; Table D
QLSSNFGAISSVLND

SEQ ID NO: 27422 - protein, 15 aa, Severe acute respiratory syndrome coronavirus 2
  REGION 1..15: note = Spike Wuhan D614G; S_Wu_7_8; Table D
NFGAISSVLNDILSR

SEQ ID NO: 27423 - protein, 15 aa, Severe acute respiratory syndrome coronavirus 2
  REGION 1..15: note = Spike Wuhan D614G; S_Wu_7_8; Table D
ISSVLNDILSRLDKV

SEQ ID NO: 27424 - protein, 15 aa, Severe acute respiratory syndrome coronavirus 2
  REGION 1..15: note = Spike Wuhan D614G; S_Wu_7_8; Table D
LNDILSRLDKVEAEV

SEQ ID NO: 27425 - protein, 15 aa, Severe acute respiratory syndrome coronavirus 2
  REGION 1..15: note = Spike Wuhan D614G; S_Wu_7_8; Table D
LSRLDKVEAEVQIDR

SEQ ID NO: 27426 - protein, 15 aa, Severe acute respiratory syndrome coronavirus 2
  REGION 1..15: note = Spike Wuhan D614G; S_Wu_7_8; Table D
DKVEAEVQIDRLITG

SEQ ID NO: 27427 - protein, 15 aa, Severe acute respiratory syndrome coronavirus 2
  REGION 1..15: note = Spike Wuhan D614G; S_Wu_7_8; Table D
AEVQIDRLITGRLQS

SEQ ID NO: 27428 - protein, 15 aa, Severe acute respiratory syndrome coronavirus 2
  REGION 1..15: note = Spike Wuhan D614G; S_Wu_7_8; Table D
IDRLITGRLQSLQTY

SEQ ID NO: 27429 - protein, 15 aa, Severe acute respiratory syndrome coronavirus 2
  REGION 1..15: note = Spike Wuhan D614G; S_Wu_7_8; Table D
ITGRLQSLQTYVTQQ

SEQ ID NO: 27430 - protein, 15 aa, Severe acute respiratory syndrome coronavirus 2
  REGION 1..15: note = Spike Wuhan D614G; S_Wu_7_8; Table D
LQSLQTYVTQQLIRA

SEQ ID NO: 27431 - protein, 15 aa, Severe acute respiratory syndrome coronavirus 2
  REGION 1..15: note = Spike Wuhan D614G; S_Wu_7_8; Table D
QTYVTQQLIRAAEIR

SEQ ID NO: 27432 - protein, 15 aa, Severe acute respiratory syndrome coronavirus 2
  REGION 1..15: note = Spike Wuhan D614G; S_Wu_7_8; Table D
TQQLIRAAEIRASAN

SEQ ID NO: 27433 - protein, 15 aa, Severe acute respiratory syndrome coronavirus 2
  REGION 1..15: note = Spike Wuhan D614G; S_Wu_7_8; Table D
IRAAEIRASANLAAT

SEQ ID NO: 27434 - protein, 15 aa, Severe acute respiratory syndrome coronavirus 2
  REGION 1..15: note = Spike Wuhan D614G; S_Wu_7_8; Table D
EIRASANLAATKMSE

SEQ ID NO: 27435 - protein, 15 aa, Severe acute respiratory syndrome coronavirus 2
  REGION 1..15: note = Spike Wuhan D614G; S_Wu_7_8; Table D
SANLAATKMSECVLG

SEQ ID NO: 27436 - protein, 15 aa, Severe acute respiratory syndrome coronavirus 2
  REGION 1..15: note = Spike Wuhan D614G; S_Wu_7_8; Table D
AATKMSECVLGQSKR

SEQ ID NO: 27437 - protein, 15 aa, Severe acute respiratory syndrome coronavirus 2
  REGION 1..15: note = Spike Wuhan D614G; S_Wu_7_8; Table D
MSECVLGQSKRVDFC

SEQ ID NO: 27438 - protein, 15 aa, Severe acute respiratory syndrome coronavirus 2
  REGION 1..15: note = Spike Wuhan D614G; S_Wu_7_8; Table D
VLGQSKRVDFCGKGY

SEQ ID NO: 27439 - protein, 15 aa, Severe acute respiratory syndrome coronavirus 2
  REGION 1..15: note = Spike Wuhan D614G; S_Wu_7_8; Table D
SKRVDFCGKGYHLMS

SEQ ID NO: 27440 - protein, 15 aa, Severe acute respiratory syndrome coronavirus 2
  REGION 1..15: note = Spike Wuhan D614G; S_Wu_7_8; Table D
DFCGKGYHLMSFPQS

SEQ ID NO: 27441 - protein, 15 aa, Severe acute respiratory syndrome coronavirus 2
  REGION 1..15: note = Spike Wuhan D614G; S_Wu_7_8; Table D
KGYHLMSFPQSAPHG

SEQ ID NO: 27442 - protein, 15 aa, Severe acute respiratory syndrome coronavirus 2
  REGION 1..15: note = Spike Wuhan D614G; S_Wu_7_8; Table D
LMSFPQSAPHGVVFL

SEQ ID NO: 27443 - protein, 15 aa, Severe acute respiratory syndrome coronavirus 2
  REGION 1..15: note = Spike Wuhan D614G; S_Wu_7_8; Table D
PQSAPHGVVFLHVTY

SEQ ID NO: 27444 - protein, 15 aa, Severe acute respiratory syndrome coronavirus 2
  REGION 1..15: note = Spike Wuhan D614G; S_Wu_7_8; Table D
PHGVVFLHVTYVPAQ

SEQ ID NO: 27445 - protein, 15 aa, Severe acute respiratory syndrome coronavirus 2
  REGION 1..15: note = Spike Wuhan D614G; S_Wu_7_8; Table D
VFLHVTYVPAQEKNF

SEQ ID NO: 27446 - protein, 15 aa, Severe acute respiratory syndrome coronavirus 2
  REGION 1..15: note = Spike Wuhan D614G; S_Wu_7_8; Table D
VTYVPAQEKNFTTAP

SEQ ID NO: 27447 - protein, 15 aa, Severe acute respiratory syndrome coronavirus 2
  REGION 1..15: note = Spike Wuhan D614G; S_Wu_7_8; Table D
PAQEKNFTTAPAICH

SEQ ID NO: 27448 - protein, 15 aa, Severe acute respiratory syndrome coronavirus 2
  REGION 1..15: note = Spike Wuhan D614G; S_Wu_7_8; Table D
KNFTTAPAICHDGKA

SEQ ID NO: 27449 - protein, 15 aa, Severe acute respiratory syndrome coronavirus 2
  REGION 1..15: note = Spike Wuhan D614G; S_Wu_7_8; Table D
TAPAICHDGKAHFPR

SEQ ID NO: 27450 - protein, 15 aa, Severe acute respiratory syndrome coronavirus 2
  REGION 1..15: note = Spike Wuhan D614G; S_Wu_7_8; Table D
ICHDGKAHFPREGVF

SEQ ID NO: 27451 - protein, 15 aa, Severe acute respiratory syndrome coronavirus 2
  REGION 1..15: note = Spike Wuhan D614G; S_Wu_7_8; Table D
GKAHFPREGVFVSNG

SEQ ID NO: 27452 - protein, 15 aa, Severe acute respiratory syndrome coronavirus 2
  REGION 1..15: note = Spike Wuhan D614G; S_Wu_7_8; Table D
FPREGVFVSNGTHWF

SEQ ID NO: 27453 - protein, 15 aa, Severe acute respiratory syndrome coronavirus 2
  REGION 1..15: note = Spike Wuhan D614G; S_Wu_7_8; Table D
GVFVSNGTHWFVTQR

SEQ ID NO: 27454 - protein, 15 aa, Severe acute respiratory syndrome coronavirus 2
  REGION 1..15: note = Spike Wuhan D614G; S_Wu_7_8; Table D
SNGTHWFVTQRNFYE

SEQ ID NO: 27455 - protein, 15 aa, Severe acute respiratory syndrome coronavirus 2
  REGION 1..15: note = Spike Wuhan D614G; S_Wu_7_8; Table D
HWFVTQRNFYEPQII

SEQ ID NO: 27456 - protein, 15 aa, Severe acute respiratory syndrome coronavirus 2
  REGION 1..15: note = Spike Wuhan D614G; S_Wu_7_8; Table D
TQRNFYEPQIITTDN

SEQ ID NO: 27457 - protein, 15 aa, Severe acute respiratory syndrome coronavirus 2
  REGION 1..15: note = Spike Wuhan D614G; S_Wu_7_8; Table D
FYEPQIITTDNTFVS

SEQ ID NO: 27458 - protein, 15 aa, Severe acute respiratory syndrome coronavirus 2
  REGION 1..15: note = Spike Wuhan D614G; S_Wu_7_8; Table D
QIITTDNTFVSGNCD

SEQ ID NO: 27459 - protein, 15 aa, Severe acute respiratory syndrome coronavirus 2
  REGION 1..15: note = Spike Wuhan D614G; S_Wu_7_8; Table D
TDNTFVSGNCDVVIG

SEQ ID NO: 27460 - protein, 15 aa, Severe acute respiratory syndrome coronavirus 2
  REGION 1..15: note = Spike Wuhan D614G; S_Wu_7_8; Table D
FVSGNCDVVIGIVNN

SEQ ID NO: 27461 - protein, 15 aa, Severe acute respiratory syndrome coronavirus 2
  REGION 1..15: note = Spike Wuhan D614G; S_Wu_7_8; Table D
NCDVVIGIVNNTVYD

SEQ ID NO: 27462 - protein, 15 aa, Severe acute respiratory syndrome coronavirus 2
  REGION 1..15: note = Spike Wuhan D614G; S_Wu_7_8; Table D
VIGIVNNTVYDPLQP

SEQ ID NO: 27463 - protein, 15 aa, Severe acute respiratory syndrome coronavirus 2
  REGION 1..15: note = Spike Wuhan D614G; S_Wu_7_8; Table D
VNNTVYDPLQPELDS

SEQ ID NO: 27464 - protein, 15 aa, Severe acute respiratory syndrome coronavirus 2
  REGION 1..15: note = Spike Wuhan D614G; S_Wu_7_8; Table D
VYDPLQPELDSFKEE

SEQ ID NO: 27465 - protein, 15 aa, Severe acute respiratory syndrome coronavirus 2
  REGION 1..15: note = Spike Wuhan D614G; S_Wu_7_8; Table D
LQPELDSFKEELDKY

SEQ ID NO: 27466 - protein, 15 aa, Severe acute respiratory syndrome coronavirus 2
  REGION 1..15: note = Spike Wuhan D614G; S_Wu_7_8; Table D
LDSFKEELDKYFKNH

SEQ ID NO: 27467 - protein, 15 aa, Severe acute respiratory syndrome coronavirus 2
  REGION 1..15: note = Spike Wuhan D614G; S_Wu_7_8; Table D
KEELDKYFKNHTSPD

SEQ ID NO: 27468 - protein, 15 aa, Severe acute respiratory syndrome coronavirus 2
  REGION 1..15: note = Spike Wuhan D614G; S_Wu_7_8; Table D
DKYFKNHTSPDVDLG

SEQ ID NO: 27469 - protein, 15 aa, Severe acute respiratory syndrome coronavirus 2
  REGION 1..15: note = Spike Wuhan D614G; S_Wu_7_8; Table D
KNHTSPDVDLGDISG

SEQ ID NO: 27470 - protein, 15 aa, Severe acute respiratory syndrome coronavirus 2
  REGION 1..15: note = Spike Wuhan D614G; S_Wu_7_8; Table D
SPDVDLGDISGINAS

SEQ ID NO: 27471 - protein, 15 aa, Severe acute respiratory syndrome coronavirus 2
  REGION 1..15: note = Spike Wuhan D614G; S_Wu_7_8; Table D
DLGDISGINASVVNI

SEQ ID NO: 27472 - protein, 15 aa, Severe acute respiratory syndrome coronavirus 2
  REGION 1..15: note = Spike Wuhan D614G; S_Wu_7_8; Table D
ISGINASVVNIQKEI

SEQ ID NO: 27473 - protein, 15 aa, Severe acute respiratory syndrome coronavirus 2
  REGION 1..15: note = Spike Wuhan D614G; S_Wu_7_8; Table D
NASVVNIQKEIDRLN

SEQ ID NO: 27474 - protein, 15 aa, Severe acute respiratory syndrome coronavirus 2
  REGION 1..15: note = Spike Wuhan D614G; S_Wu_7_8; Table D
VNIQKEIDRLNEVAK

SEQ ID NO: 27475 - protein, 15 aa, Severe acute respiratory syndrome coronavirus 2
  REGION 1..15: note = Spike Wuhan D614G; S_Wu_7_8; Table D
KEIDRLNEVAKNLNE

SEQ ID NO: 27476 - protein, 15 aa, Severe acute respiratory syndrome coronavirus 2
  REGION 1..15: note = Spike Wuhan D614G; S_Wu_7_8; Table D
RLNEVAKNLNESLID

SEQ ID NO: 27477 - protein, 15 aa, Severe acute respiratory syndrome coronavirus 2
  REGION 1..15: note = Spike Wuhan D614G; S_Wu_7_8; Table D
VAKNLNESLIDLQEL

SEQ ID NO: 27478 - protein, 15 aa, Severe acute respiratory syndrome coronavirus 2
  REGION 1..15: note = Spike Wuhan D614G; S_Wu_7_8; Table D
LNESLIDLQELGKYE

SEQ ID NO: 27479 - protein, 15 aa, Severe acute respiratory syndrome coronavirus 2
  REGION 1..15: note = Spike Wuhan D614G; S_Wu_7_8; Table D
LIDLQELGKYEQYIK

SEQ ID NO: 27480 - protein, 15 aa, Severe acute respiratory syndrome coronavirus 2
  REGION 1..15: note = Spike Wuhan D614G; S_Wu_7_8; Table D
QELGKYEQYIKWPWY

SEQ ID NO: 27481 - protein, 15 aa, Severe acute respiratory syndrome coronavirus 2
  REGION 1..15: note = Spike Wuhan D614G; S_Wu_7_8; Table D
KYEQYIKWPWYIWLG

SEQ ID NO: 27482 - protein, 15 aa, Severe acute respiratory syndrome coronavirus 2
  REGION 1..15: note = Spike Wuhan D614G; S_Wu_7_8; Table D
YIKWPWYIWLGFIAG

SEQ ID NO: 27483 - protein, 15 aa, Severe acute respiratory syndrome coronavirus 2
  REGION 1..15: note = Spike Wuhan D614G; S_Wu_7_8; Table D
PWYIWLGFIAGLIAI

SEQ ID NO: 27484 - protein, 15 aa, Severe acute respiratory syndrome coronavirus 2
  REGION 1..15: note = Spike Wuhan D614G; S_Wu_7_8; Table D
WLGFIAGLIAIVMVT

SEQ ID NO: 27485 - protein, 15 aa, Severe acute respiratory syndrome coronavirus 2
  REGION 1..15: note = Spike Wuhan D614G; S_Wu_7_8; Table D
IAGLIAIVMVTIMLC

SEQ ID NO: 27486 - protein, 15 aa, Severe acute respiratory syndrome coronavirus 2
  REGION 1..15: note = Spike Wuhan D614G; S_Wu_7_8; Table D
IAIVMVTIMLCCMTS

SEQ ID NO: 27487 - protein, 15 aa, Severe acute respiratory syndrome coronavirus 2
  REGION 1..15: note = Spike Wuhan D614G; S_Wu_7_8; Table D
MVTIMLCCMTSCCSC

SEQ ID NO: 27488 - protein, 15 aa, Severe acute respiratory syndrome coronavirus 2
  REGION 1..15: note = Spike Wuhan D614G; S_Wu_7_8; Table D
MLCCMTSCCSCLKGC

SEQ ID NO: 27489 - protein, 15 aa, Severe acute respiratory syndrome coronavirus 2
  REGION 1..15: note = Spike Wuhan D614G; S_Wu_7_8; Table D
MTSCCSCLKGCCSCG

SEQ ID NO: 27490 - protein, 15 aa, Severe acute respiratory syndrome coronavirus 2
  REGION 1..15: note = Spike Wuhan D614G; S_Wu_7_8; Table D
CSCLKGCCSCGSCCK

SEQ ID NO: 27491 - protein, 15 aa, Severe acute respiratory syndrome coronavirus 2
  REGION 1..15: note = Spike Wuhan D614G; S_Wu_7_8; Table D
KGCCSCGSCCKFDED

SEQ ID NO: 27492 - protein, 15 aa, Severe acute respiratory syndrome coronavirus 2
  REGION 1..15: note = Spike Wuhan D614G; S_Wu_7_8; Table D
SCGSCCKFDEDDSEP

SEQ ID NO: 27493 - protein, 15 aa, Severe acute respiratory syndrome coronavirus 2
  REGION 1..15: note = Spike Wuhan D614G; S_Wu_7_8; Table D
CCKFDEDDSEPVLKG

SEQ ID NO: 27494 - protein, 15 aa, Severe acute respiratory syndrome coronavirus 2
  REGION 1..15: note = Spike Wuhan D614G; S_Wu_7_8; Table D
DEDDSEPVLKGVKLH

SEQ ID NO: 27495 - protein, 13 aa, Severe acute respiratory syndrome coronavirus 2
  REGION 1..13: note = Spike Wuhan D614G; S_Wu_7_8; Table D
SEPVLKGVKLHYT

SEQ ID NO: 27496 - protein, 15 aa, Severe acute respiratory syndrome coronavirus 2
  REGION 1..15: note = Membrane; OLP_Mem; Table E
LLWPVTLACFVLAAV

SEQ ID NO: 27497 - protein, 15 aa, Severe acute respiratory syndrome coronavirus 2
  REGION 1..15: note = Membrane; OLP_Mem; Table E
VTLACFVLAAVYRIN

SEQ ID NO: 27498 - protein, 12 aa, Severe acute respiratory syndrome coronavirus 2
  REGION 1..12: note = Membrane; OLP_Mem; Table E
CFVLAAVYRINW

SEQ ID NO: 27499 - protein, 15 aa, Severe acute respiratory syndrome coronavirus 2
  REGION 1..15: note = Membrane; OLP_Mem; Table E
MACLVGLMWLSYFIA

SEQ ID NO: 27500 - protein, 15 aa, Severe acute respiratory syndrome coronavirus 2
  REGION 1..15: note = Membrane; OLP_Mem; Table E
VGLMWLSYFIASFRL

SEQ ID NO: 27501 - protein, 15 aa, Severe acute respiratory syndrome coronavirus 2
  REGION 1..15: note = Nucleocapsid; OLP_Nuc; Table E
RRPQGLPNNTASWFT

SEQ ID NO: 27502 - protein, 15 aa, Severe acute respiratory syndrome coronavirus 2
  REGION 1..15: note = Nucleocapsid; OLP_Nuc; Table E
GLPNNTASWFTALTQ

SEQ ID NO: 27503 - protein, 15 aa, Severe acute respiratory syndrome coronavirus 2
  REGION 1..15: note = Nucleocapsid; OLP_Nuc; Table E
NTASWFTALTQHGKE

SEQ ID NO: 27504 - protein, 15 aa, Severe acute respiratory syndrome coronavirus 2
  REGION 1..15: note = Nucleocapsid; OLP_Nuc; Table E
WFTALTQHGKEDLKF

SEQ ID NO: 27505 - protein, 15 aa, Severe acute respiratory syndrome coronavirus 2
  REGION 1..15: note = Nucleocapsid; OLP_Nuc; Table E
LTQHGKEDLKFPRGQ

SEQ ID NO: 27506 - protein, 15 aa, Severe acute respiratory syndrome coronavirus 2
  REGION 1..15: note = Nucleocapsid; OLP_Nuc; Table E
GKEDLKFPRGQGVPI

SEQ ID NO: 27507 - protein, 15 aa, Severe acute respiratory syndrome coronavirus 2
  REGION 1..15: note = Nucleocapsid; OLP_Nuc; Table E
LKFPRGQGVPINTNS

SEQ ID NO: 27508 - protein, 15 aa, Severe acute respiratory syndrome coronavirus 2
  REGION 1..15: note = Nucleocapsid; OLP_Nuc; Table E
RGQGVPINTNSSPDD

SEQ ID NO: 27509 - protein, 15 aa, Severe acute respiratory syndrome coronavirus 2
  REGION 1..15: note = Nucleocapsid; OLP_Nuc; Table E
VPINTNSSPDDQIGY

SEQ ID NO: 27510 - protein, 15 aa, Severe acute respiratory syndrome coronavirus 2
  REGION 1..15: note = Nucleocapsid; OLP_Nuc; Table E
TNSSPDDQIGYYRRA

SEQ ID NO: 27511 - protein, 15 aa, Severe acute respiratory syndrome coronavirus 2
  REGION 1..15: note = Nucleocapsid; OLP_Nuc; Table E
PDDQIGYYRRATRRI

SEQ ID NO: 27512 - protein, 15 aa, Severe acute respiratory syndrome coronavirus 2
  REGION 1..15: note = Nucleocapsid; OLP_Nuc; Table E
KMKDLSPRWYFYYLG

SEQ ID NO: 27513 - protein, 15 aa, Severe acute respiratory syndrome coronavirus 2
  REGION 1..15: note = Nucleocapsid; OLP_Nuc; Table E
LSPRWYFYYLGTGPE

SEQ ID NO: 27514 - protein, 15 aa, Severe acute respiratory syndrome coronavirus 2
  REGION 1..15: note = Nucleocapsid; OLP_Nuc; Table E
GIIWVATEGALNTPK

SEQ ID NO: 27515 - protein, 15 aa, Severe acute respiratory syndrome coronavirus 2
  REGION 1..15: note = Nucleocapsid; OLP_Nuc; Table E
VATEGALNTPKDHIG

SEQ ID NO: 27516 - protein, 15 aa, Severe acute respiratory syndrome coronavirus 2
  REGION 1..15: note = Nucleocapsid; OLP_Nuc; Table E
GALNTPKDHIGTRNP

SEQ ID NO: 27517 - protein, 15 aa, Severe acute respiratory syndrome coronavirus 2
  REGION 1..15: note = Nucleocapsid; OLP_Nuc; Table E
TPKDHIGTRNPANNA

SEQ ID NO: 27518 - protein, 15 aa, Severe acute respiratory syndrome coronavirus 2
  REGION 1..15: note = Nucleocapsid; OLP_Nuc; Table E
HIGTRNPANNAAIVL

SEQ ID NO: 27519 - protein, 15 aa, Severe acute respiratory syndrome coronavirus 2
  REGION 1..15: note = Nucleocapsid; OLP_Nuc; Table E
RNPANNAAIVLQLPQ

SEQ ID NO: 27520 - protein, 15 aa, Severe acute respiratory syndrome coronavirus 2
  REGION 1..15: note = Nucleocapsid; OLP_Nuc; Table E
NNAAIVLQLPQGTTL

SEQ ID NO: 27521 - protein, 15 aa, Severe acute respiratory syndrome coronavirus 2
  REGION 1..15: note = Nucleocapsid; OLP_Nuc; Table E
IVLQLPQGTTLPKGF

SEQ ID NO: 27522 - protein, 14 aa, Severe acute respiratory syndrome coronavirus 2
  REGION 1..14: note = Nucleocapsid; OLP_Nuc; Table E
LPQGTTLPKGFYAE

SEQ ID NO: 27523 - protein, 15 aa, Severe acute respiratory syndrome coronavirus 2
  REGION 1..15: note = Nucleocapsid; OLP_Nuc; Table E
TSPARMAGNGGDAAL

SEQ ID NO: 27524 - protein, 15 aa, Severe acute respiratory syndrome coronavirus 2
  REGION 1..15: note = Nucleocapsid; OLP_Nuc; Table E
RMAGNGGDAALALLL

SEQ ID NO: 27525 - protein, 15 aa, Severe acute respiratory syndrome coronavirus 2
  REGION 1..15: note = Nucleocapsid; OLP_Nuc; Table E
NGGDAALALLLLDRL

SEQ ID NO: 27526 - protein, 15 aa, Severe acute respiratory syndrome coronavirus 2
  REGION 1..15: note = Nucleocapsid; OLP_Nuc; Table E
AALALLLLDRLNQLE

SEQ ID NO: 27527 - protein, 15 aa, Severe acute respiratory syndrome coronavirus 2
  REGION 1..15: note = Nucleocapsid; OLP_Nuc; Table E
LLLLDRLNQLESKMS

SEQ ID NO: 27528 - protein, 15 aa, Severe acute respiratory syndrome coronavirus 2
  REGION 1..15: note = Nucleocapsid; OLP_Nuc; Table E
DRLNQLESKMSGKGQ

SEQ ID NO: 27529 - protein, 15 aa, Severe acute respiratory syndrome coronavirus 2
  REGION 1..15: note = Nucleocapsid; OLP_Nuc; Table E
KMSGKGQQQQGQTVT

SEQ ID NO: 27530 - protein, 15 aa, Severe acute respiratory syndrome coronavirus 2
  REGION 1..15: note = Nucleocapsid; OLP_Nuc; Table E
KGQQQQGQTVTKKSA

SEQ ID NO: 27531 - protein, 15 aa, Severe acute respiratory syndrome coronavirus 2
  REGION 1..15: note = Nucleocapsid; OLP_Nuc; Table E
QQGQTVTKKSAAEAS

SEQ ID NO: 27532 - protein, 15 aa, Severe acute respiratory syndrome coronavirus 2
  REGION 1..15: note = Nucleocapsid; OLP_Nuc; Table E
TVTKKSAAEASKKPR

SEQ ID NO: 27533 - protein, 15 aa, Severe acute respiratory syndrome coronavirus 2
  REGION 1..15: note = Nucleocapsid; OLP_Nuc; Table E
KSAAEASKKPRQKRT

SEQ ID NO: 27534 - protein, 15 aa, Severe acute respiratory syndrome coronavirus 2
  REGION 1..15: note = Nucleocapsid; OLP_Nuc; Table E
EASKKPRQKRTATKA

SEQ ID NO: 27535 - protein, 15 aa, Severe acute respiratory syndrome coronavirus 2
  REGION 1..15: note = Nucleocapsid; OLP_Nuc; Table E
KPRQKRTATKAYNVT

SEQ ID NO: 27536 - protein, 15 aa, Severe acute respiratory syndrome coronavirus 2
  REGION 1..15: note = Nucleocapsid; OLP_Nuc; Table E
KRTATKAYNVTQAFG

SEQ ID NO: 27537 - protein, 15 aa, Severe acute respiratory syndrome coronavirus 2
  REGION 1..15: note = Nucleocapsid; OLP_Nuc; Table E
TKAYNVTQAFGRRGP

SEQ ID NO: 27538 - protein, 14 aa, Severe acute respiratory syndrome coronavirus 2
  REGION 1..14: note = Nucleocapsid; OLP_Nuc; Table E
NVTQAFGRRGPEQT

SEQ ID NO: 27539 - protein, 15 aa, Severe acute respiratory syndrome coronavirus 2
  REGION 1..15: note = Nucleocapsid; OLP_Nuc; Table E
GNFGDQELIRQGTDY

SEQ ID NO: 27540 - protein, 15 aa, Severe acute respiratory syndrome coronavirus 2
  REGION 1..15: note = Nucleocapsid; OLP_Nuc; Table E
DQELIRQGTDYKHWP

SEQ ID NO: 27541 - protein, 15 aa, Severe acute respiratory syndrome coronavirus 2
  REGION 1..15: note = Nucleocapsid; OLP_Nuc; Table E
IRQGTDYKHWPQIAQ

SEQ ID NO: 27542 - protein, 15 aa, Severe acute respiratory syndrome coronavirus 2
  REGION 1..15: note = Nucleocapsid; OLP_Nuc; Table E
TDYKHWPQIAQFAPS

SEQ ID NO: 27543 - protein, 15 aa, Severe acute respiratory syndrome coronavirus 2
  REGION 1..15: note = Nucleocapsid; OLP_Nuc; Table E
HWPQIAQFAPSASAF

SEQ ID NO: 27544 - protein, 15 aa, Severe acute respiratory syndrome coronavirus 2
  REGION 1..15: note = Nucleocapsid; OLP_Nuc; Table E
IAQFAPSASAFFGMS

SEQ ID NO: 27545 - protein, 15 aa, Severe acute respiratory syndrome coronavirus 2
  REGION 1..15: note = Nucleocapsid; OLP_Nuc; Table E
APSASAFFGMSRIGM

SEQ ID NO: 27546 - protein, 15 aa, Severe acute respiratory syndrome coronavirus 2
  REGION 1..15: note = Nucleocapsid; OLP_Nuc; Table E
SAFFGMSRIGMEVTP

SEQ ID NO: 27547 - protein, 15 aa, Severe acute respiratory syndrome coronavirus 2
  REGION 1..15: note = Nucleocapsid; OLP_Nuc; Table E
GMSRIGMEVTPSGTW

SEQ ID NO: 27548 - protein, 15 aa, Severe acute respiratory syndrome coronavirus 2
  REGION 1..15: note = Nucleocapsid; OLP_Nuc; Table E
IGMEVTPSGTWLTYT

SEQ ID NO: 27549 - protein, 15 aa, Severe acute respiratory syndrome coronavirus 2
  REGION 1..15: note = Nucleocapsid; OLP_Nuc; Table E
VTPSGTWLTYTGAIK

SEQ ID NO: 27550 - protein, 15 aa, Severe acute respiratory syndrome coronavirus 2
  REGION 1..15: note = Nucleocapsid; OLP_Nuc; Table E
FKDQVILLNKHIDAY

SEQ ID NO: 27551 - protein, 15 aa, Severe acute respiratory syndrome coronavirus 2
  REGION 1..15: note = Nucleocapsid; OLP_Nuc; Table E
VILLNKHIDAYKTFP

SEQ ID NO: 27552 - protein, 15 aa, Severe acute respiratory syndrome coronavirus 2
  REGION 1..15: note = Nucleocapsid; OLP_Nuc; Table E
NKHIDAYKTFPPTEP

SEQ ID NO: 27553 - protein, 15 aa, Severe acute respiratory syndrome coronavirus 2
  REGION 1..15: note = Nucleocapsid; OLP_Nuc; Table E
DAYKTFPPTEPKKDK

SEQ ID NO: 27554 - protein, 14 aa, Severe acute respiratory syndrome coronavirus 2
  REGION 1..14: note = Nucleocapsid; OLP_Nuc; Table E
TFPPTEPKKDKKKK

SEQ ID NO: 27555 - protein, 15 aa, Severe acute respiratory syndrome coronavirus 2
  REGION 1..15: note = Nucleocapsid; OLP_Nuc; Table E
KKDKKKKADETQALP

SEQ ID NO: 27556 - protein, 15 aa, Severe acute respiratory syndrome coronavirus 2
  REGION 1..15: note = Nucleocapsid; OLP_Nuc; Table E
KKKADETQALPQRQK

SEQ ID NO: 27557 - protein, 15 aa, Severe acute respiratory syndrome coronavirus 2
  REGION 1..15: note = Nucleocapsid; OLP_Nuc; Table E
DETQALPQRQKKQQT

SEQ ID NO: 27558 - protein, 15 aa, Severe acute respiratory syndrome coronavirus 2
  REGION 1..15: note = Nucleocapsid; OLP_Nuc; Table E
ALPQRQKKQQTVTLL

SEQ ID NO: 27559 - protein, 15 aa, Severe acute respiratory syndrome coronavirus 2
  REGION 1..15: note = Nucleocapsid; OLP_Nuc; Table E
RQKKQQTVTLLPAAD

SEQ ID NO: 27560 - protein, 15 aa, Severe acute respiratory syndrome coronavirus 2
  REGION 1..15: note = Nucleocapsid; OLP_Nuc; Table E
QQTVTLLPAADLDDF

SEQ ID NO: 27561 - protein, 15 aa, Severe acute respiratory syndrome coronavirus 2
  REGION 1..15: note = Nucleocapsid; OLP_Nuc; Table E
TLLPAADLDDFSKQL

SEQ ID NO: 27562 - protein, 12 aa, Severe acute respiratory syndrome coronavirus 2
  REGION 1..12: note = Nucleocapsid; OLP_Nuc; Table E
AADLDDFSKQLQ

SEQ ID NO: 27563 - protein, 15 aa, Severe acute respiratory syndrome coronavirus 2
  REGION 1..15: note = ORF3a; OLP_ORF3a; Table E
VTLKQGEIKDATPSD

SEQ ID NO: 27564 - protein, 15 aa, Severe acute respiratory syndrome coronavirus 2
  REGION 1..15: note = ORF3a; OLP_ORF3a; Table E
QGEIKDATPSDFVRA

SEQ ID NO: 27565 - protein, 15 aa, Severe acute respiratory syndrome coronavirus 2
  REGION 1..15: note = ORF3a; OLP_ORF3a; Table E
KDATPSDFVRATATI

SEQ ID NO: 27566 - protein, 15 aa, Severe acute respiratory syndrome coronavirus 2
  REGION 1..15: note = ORF3a; OLP_ORF3a; Table E
PSDFVRATATIPIQA

SEQ ID NO: 27567 - protein, 15 aa, Severe acute respiratory syndrome coronavirus 2
  REGION 1..15: note = ORF3a; OLP_ORF3a; Table E
VRATATIPIQASLPF

SEQ ID NO: 27568 - protein, 15 aa, Severe acute respiratory syndrome coronavirus 2
  REGION 1..15: note = ORF3a; OLP_ORF3a; Table E
ATIPIQASLPFGWLI

SEQ ID NO: 27569 - protein, 15 aa, Severe acute respiratory syndrome coronavirus 2
  REGION 1..15: note = ORF3a; OLP_ORF3a; Table E
IQASLPFGWLIVGVA

SEQ ID NO: 27570 - protein, 15 aa, Severe acute respiratory syndrome coronavirus 2
  REGION 1..15: note = ORF3a; OLP_ORF3a; Table E
LPFGWLIVGVALLAV

SEQ ID NO: 27571 - protein, 15 aa, Severe acute respiratory syndrome coronavirus 2
  REGION 1..15: note = ORF3a; OLP_ORF3a; Table E
LAVFQSASKIITLKK

SEQ ID NO: 27572 - protein, 15 aa, Severe acute respiratory syndrome coronavirus 2
  REGION 1..15: note = ORF3a; OLP_ORF3a; Table E
QSASKIITLKKRWQL

SEQ ID NO: 27573 - protein, 15 aa, Severe acute respiratory syndrome coronavirus 2
  REGION 1..15: note = ORF3a; OLP_ORF3a; Table E
KIITLKKRWQLALSK

SEQ ID NO: 27574 - protein, 15 aa, Severe acute respiratory syndrome coronavirus 2
  REGION 1..15: note = ORF3a; OLP_ORF3a; Table E
LKKRWQLALSKGVHF

SEQ ID NO: 27575 - protein, 15 aa, Severe acute respiratory syndrome coronavirus 2
  REGION 1..15: note = ORF3a; OLP_ORF3a; Table E
WQLALSKGVHFVCNL

SEQ ID NO: 27576 - protein, 13 aa, Severe acute respiratory syndrome coronavirus 2
  REGION 1..13: note = ORF3a; OLP_ORF3a; Table E
LSKGVHFVCNLLL

SEQ ID NO: 27577 - protein, 15 aa, Severe acute respiratory syndrome coronavirus 2
  REGION 1..15: note = ORF3a; OLP_ORF3a; Table E
EAPFLYLYALVYFLQ

SEQ ID NO: 27578 - protein, 15 aa, Severe acute respiratory syndrome coronavirus 2
  REGION 1..15: note = ORF3a; OLP_ORF3a; Table E
LYLYALVYFLQSINF

SEQ ID NO: 27579 - protein, 15 aa, Severe acute respiratory syndrome coronavirus 2
  REGION 1..15: note = ORF3a; OLP_ORF3a; Table E
ALVYFLQSINFVRII

SEQ ID NO: 27580 - protein, 15 aa, Severe acute respiratory syndrome coronavirus 2
  REGION 1..15: note = ORF3a; OLP_ORF3a; Table E
FLQSINFVRIIMRLW

SEQ ID NO: 27581 - protein, 15 aa, Severe acute respiratory syndrome coronavirus 2
  REGION 1..15: note = ORF3a; OLP_ORF3a; Table E
INFVRIIMRLWLCWK

SEQ ID NO: 27582 - protein, 15 aa, Severe acute respiratory syndrome coronavirus 2
  REGION 1..15: note = ORF3a; OLP_ORF3a; Table E
RIIMRLWLCWKCRSK

SEQ ID NO: 27583 - protein, 15 aa, Severe acute respiratory syndrome coronavirus 2
  REGION 1..15: note = ORF3a; OLP_ORF3a; Table E
RLWLCWKCRSKNPLL

SEQ ID NO: 27584 - protein, 15 aa, Severe acute respiratory syndrome coronavirus 2
  REGION 1..15: note = ORF3a; OLP_ORF3a; Table E
CWKCRSKNPLLYDAN

SEQ ID NO: 27585 - protein, 15 aa, Severe acute respiratory syndrome coronavirus 2
  REGION 1..15: note = ORF3a; OLP_ORF3a; Table E
RSKNPLLYDANYFLC

SEQ ID NO: 27586 - protein, 15 aa, Severe acute respiratory syndrome coronavirus 2
  REGION 1..15: note = ORF3a; OLP_ORF3a; Table E
PLLYDANYFLCWHTN

SEQ ID NO: 27587 - protein, 15 aa, Severe acute respiratory syndrome coronavirus 2
  REGION 1..15: note = ORF3a; OLP_ORF3a; Table E
ITSGDGTTSPISEHD

SEQ ID NO: 27588 - protein, 15 aa, Severe acute respiratory syndrome coronavirus 2
  REGION 1..15: note = ORF3a; OLP_ORF3a; Table E
DGTTSPISEHDYQIG

SEQ ID NO: 27589 - protein, 15 aa, Severe acute respiratory syndrome coronavirus 2
  REGION 1..15: note = ORF3a; OLP_ORF3a; Table E
SPISEHDYQIGGYTE

SEQ ID NO: 27590 - protein, 15 aa, Severe acute respiratory syndrome coronavirus 2
  REGION 1..15: note = ORF3a; OLP_ORF3a; Table E
EHDYQIGGYTEKWES

SEQ ID NO: 27591 - protein, 14 aa, Severe acute respiratory syndrome coronavirus 2
  REGION 1..14: note = ORF3a; OLP_ORF3a; Table E
QIGGYTEKWESGVK

SEQ ID NO: 27592 - protein, 15 aa, Severe acute respiratory syndrome coronavirus 2
  REGION 1..15: note = ORF3a; OLP_ORF3a; Table E
DCVVLHSYFTSDYYQ

SEQ ID NO: 27593 - protein, 15 aa, Severe acute respiratory syndrome coronavirus 2
  REGION 1..15: note = ORF3a; OLP_ORF3a; Table E
LHSYFTSDYYQLYST

SEQ ID NO: 27594 - protein, 15 aa, Severe acute respiratory syndrome coronavirus 2
  REGION 1..15: note = ORF3a; OLP_ORF3a; Table E
FTSDYYQLYSTQLST

SEQ ID NO: 27595 - protein, 15 aa, Severe acute respiratory syndrome coronavirus 2
  REGION 1..15: note = ORF3a; OLP_ORF3a; Table E
YYQLYSTQLSTDTGV

SEQ ID NO: 27596 - protein, 15 aa, Severe acute respiratory syndrome coronavirus 2
  REGION 1..15: note = ORF3a; OLP_ORF3a; Table E
YSTQLSTDTGVEHVT

SEQ ID NO: 27597 - protein, 15 aa, Severe acute respiratory syndrome coronavirus 2
  REGION 1..15: note = ORF3a; OLP_ORF3a; Table E
LSTDTGVEHVTFFIY

SEQ ID NO: 27598 - protein, 15 aa, Severe acute respiratory syndrome coronavirus 2
  REGION 1..15: note = ORF3a; OLP_ORF3a; Table E
TGVEHVTFFIYNKIV

SEQ ID NO: 27599 - protein, 15 aa, Severe acute respiratory syndrome coronavirus 2
  REGION 1..15: note = ORF3a; OLP_ORF3a; Table E
HVTFFIYNKIVDEPE

SEQ ID NO: 27600 - protein, 15 aa, Severe acute respiratory syndrome coronavirus 2
  REGION 1..15: note = ORF3a; OLP_ORF3a; Table E
FIYNKIVDEPEEHVQ

SEQ ID NO: 27601 - protein, 15 aa, Severe acute respiratory syndrome coronavirus 2
  REGION 1..15: note = ORF3a; OLP_ORF3a; Table E
KIVDEPEEHVQIHTI

SEQ ID NO: 27602 - protein, 15 aa, Severe acute respiratory syndrome coronavirus 2
  REGION 1..15: note = ORF3a; OLP_ORF3a; Table E
EPEEHVQIHTIDGSS

SEQ ID NO: 27603 - protein, 12 aa, Severe acute respiratory syndrome coronavirus 2
  REGION 1..12: note = ORF3a; OLP_ORF3a; Table E
HVQIHTIDGSSG

SEQ ID NO: 27604 - protein, 9 aa, Severe acute respiratory syndrome coronavirus 2
  REGION 1..9: note = ORF3a 52-85; Min_validated; Table F
ALSKGVHFV

SEQ ID NO: 27605 - protein, 9 aa, Severe acute respiratory syndrome coronavirus 2
  REGION 1..9: note = N 204-239; Min_validated; Table F
LLLDRLNQL

SEQ ID NO: 27606 - protein, 9 aa, Severe acute respiratory syndrome coronavirus 2
  REGION 1..9: note = ORF3a 52-85; Min_validated; Table F
SASKIITLK

SEQ ID NO: 27607 - protein, 9 aa, Severe acute respiratory syndrome coronavirus 2
  REGION 1..9: note = N 345-375; Min_validated; Table F
KTFPPTEPK

SEQ ID NO: 27608 - protein, 10 aa, Severe acute respiratory syndrome coronavirus 2
  REGION 1..10: note = N 283-338; Min_validated; Table F
AQFAPSASAF

SEQ ID NO: 27609 - protein, 9 aa, Severe acute respiratory syndrome coronavirus 2
  REGION 1..9: note = ORF3a 198-254; Min_validated; Table F
YYQLYSTQL

SEQ ID NO: 27610 - protein, 10 aa, Severe acute respiratory syndrome coronavirus 2
  REGION 1..10: note = N 128-174; Min_validated; Table F
ATEGALNTPK

SEQ ID NO: 27611 - protein, 9 aa, Severe acute respiratory syndrome coronavirus 2
  REGION 1..9: note = ORF3a 101-152; Min_validated; Table F
VYFLQSINF

SEQ ID NO: 27612 - protein, 9 aa, Severe acute respiratory syndrome coronavirus 2
  REGION 1..9: note = N 283-338; Min_validated; Table F
GMSRIGMEV

SEQ ID NO: 27613 - protein, 10 aa, Severe acute respiratory syndrome coronavirus 2
  REGION 1..10: note = N 345-375; Min_validated; Table F
KTFPPTEPKK

SEQ ID NO: 27614 - protein, 9 aa, Severe acute respiratory syndrome coronavirus 2
  REGION 1..9: note = ORF3a 198-254; Min_validated; Table F
FTSDYYQLY

SEQ ID NO: 27615 - protein, 9 aa, Severe acute respiratory syndrome coronavirus 2
  REGION 1..9: note = N 283-338; Min_validated; Table F
ASAFFGMSR

SEQ ID NO: 27616 - protein, 9 aa, Severe acute respiratory syndrome coronavirus 2
  REGION 1..9: note = N 99-118; Min_validated; Table F
SPRWYFYYL

SEQ ID NO: 27617 - protein, 9 aa, Severe acute respiratory syndrome coronavirus 2
  REGION 1..9: note = ORF3a 101-152; Min_validated; Table F
YLYALVYFL

SEQ ID NO: 27618 - protein, 9 aa, Severe acute respiratory syndrome coronavirus 2
  REGION 1..9: note = N 283-338; Min_validated; Table F
MEVTPSGTW

SEQ ID NO: 27619 - protein, 9 aa, Severe acute respiratory syndrome coronavirus 2
  REGION 1..9: note = ORF3a 101-152; Min_validated; Table F
LLYDANYFL

SEQ ID NO: 27620 - protein, 10 aa, Severe acute respiratory syndrome coronavirus 2
  REGION 1..10: note = N 204-239; Min_validated; Table F
LLLLDRLNQL

SEQ ID NO: 27621 - protein, 10 aa, Severe acute respiratory syndrome coronavirus 2
  REGION 1..10: note = N 128-174; Min_validated; Table F
NPANNAAIVL

SEQ ID NO: 27622 - protein, 9 aa, Severe acute respiratory syndrome coronavirus 2
  REGION 1..9: note = N 128-174; Min_validated; Table F
LQLPQGTTL

SEQ ID NO: 27623 - protein, 9 aa, Severe acute respiratory syndrome coronavirus 2
  REGION 1..9: note = N 39-94; Min_validated; Table F
FPRGQGVPI

SEQ ID NO: 27624 - protein, 10 aa, Severe acute respiratory syndrome coronavirus 2
  REGION 1..10: note = N 283-338; Min_validated; Table F
MEVTPSGTWL

SEQ ID NO: 27625 - protein, 9 aa, Severe acute respiratory syndrome coronavirus 2
  REGION 1..9: note = N 204-239; Min_validated; Table F
LALLLLDRL

SEQ ID NO: 27626 - protein, 9 aa, Severe acute respiratory syndrome coronavirus 2
  REGION 1..9: note = N 232-282; Min_validated; Table F
KPRQKRTAT

SEQ ID NO: 27627 - protein, 9 aa, Severe acute respiratory syndrome coronavirus 2
  REGION 1..9: note = N 128-174; Min_validated; Table F
ALNTPKDHI

SEQ ID NO: 27628 - protein, 11 aa, Severe acute respiratory syndrome coronavirus 2
  REGION 1..11: note = N 283-338; Min_validated; Table F
DYKHWPQIAQF

SEQ ID NO: 27629 - protein, 9 aa, Severe acute respiratory syndrome coronavirus 2
  REGION 1..9: note = M 83-102; Min_validated; Table F
GLMWLSYFI

SEQ ID NO: 27630 - protein, 10 aa, Severe acute respiratory syndrome coronavirus 2
  REGION 1..10: note = M 55-75; Min_validated; Table F
TLACFVLAAV

SEQ ID NO: 27631 - protein, 9 aa, Severe acute respiratory syndrome coronavirus 2
  REGION 1..9: note = N 232-282; Min_EDGE_Nuc; Table F
KAYNVTQAF

SEQ ID NO: 27632 - protein, 9 aa, Severe acute respiratory syndrome coronavirus 2
  REGION 1..9: note = N 232-282; Min_EDGE_Nuc; Table F
GQQQQGQTV

SEQ ID NO: 27633 - protein, 9 aa, Severe acute respiratory syndrome coronavirus 2
  REGION 1..9: note = N 368-408; Min_EDGE_Nuc; Table F
LPAADLDDF

SEQ ID NO: 27634 - protein, 9 aa, Severe acute respiratory syndrome coronavirus 2
  REGION 1..9: note = N 283-338; Min_EDGE_Nuc; Table F
ELIRQGTDY

SEQ ID NO: 27635 - protein, 9 aa, Severe acute respiratory syndrome coronavirus 2
  REGION 1..9: note = N 283-338; Min_EDGE_Nuc; Table F
QFAPSASAF

SEQ ID NO: 27636 - protein, 11 aa, Severe acute respiratory syndrome coronavirus 2
  REGION 1..11: note = N 232-282; Min_EDGE_Nuc; Table F
GQQQQGQTVTK

SEQ ID NO: 27637 - protein, 9 aa, Severe acute respiratory syndrome coronavirus 2
  REGION 1..9: note = N 283-338; Min_EDGE_Nuc; Table F
TPSGTWLTY

SEQ ID NO: 27638 - protein, 9 aa, Severe acute respiratory syndrome coronavirus 2
  REGION 1..9: note = N 283-338; Min_EDGE_Nuc; Table F
KHWPQIAQF

SEQ ID NO: 27639 - protein, 8 aa, Severe acute respiratory syndrome coronavirus 2
  REGION 1..8: note = N 232-282; Min_EDGE_Nuc; Table F
AYNVTQAF

SEQ ID NO: 27640 - protein, 10 aa, Severe acute respiratory syndrome coronavirus 2
  REGION 1..10: note = N 368-408; Min_EDGE_Nuc; Table F
ETQALPQRQK

SEQ ID NO: 27641 - protein, 11 aa, Severe acute respiratory syndrome coronavirus 2
  REGION 1..11: note = N 232-282; Min_EDGE_Nuc; Table F
KAYNVTQAFGR

SEQ ID NO: 27642 - protein, 9 aa, Severe acute respiratory syndrome coronavirus 2
  REGION 1..9: note = N 128-174; Min_EDGE_Nuc; Table F
TPKDHIGTR

SEQ ID NO: 27643 - protein, 9 aa, Severe acute respiratory syndrome coronavirus 2
  REGION 1..9: note = N 39-94; Min_EDGE_Nuc; Table F
QHGKEDLKF

SEQ ID NO: 27644 - protein, 10 aa, Severe acute respiratory syndrome coronavirus 2
  REGION 1..10: note = N 39-94; Min_EDGE_Nuc; Table F
TQHGKEDLKF

SEQ ID NO: 27645 - protein, 9 aa, Severe acute respiratory syndrome coronavirus 2
  REGION 1..9: note = N 232-282; Min_EDGE_Nuc; Table F
NVTQAFGRR

SEQ ID NO: 27646 - protein, 11 aa, Severe acute respiratory syndrome coronavirus 2
  REGION 1..11: note = N 283-338; Min_EDGE_Nuc; Table F
AQFAPSASAFF

SEQ ID NO: 27647 - protein, 9 aa, Severe acute respiratory syndrome coronavirus 2
  REGION 1..9: note = N 204-239; Min_EDGE_Nuc; Table F
RLNQLESKM

SEQ ID NO: 27648 - protein, 9 aa, Severe acute respiratory syndrome coronavirus 2
  REGION 1..9: note = N 39-94; Min_EDGE_Nuc; Table F
SPDDQIGYY

SEQ ID NO: 27649 - protein, 8 aa, Severe acute respiratory syndrome coronavirus 2
  REGION 1..8: note = N 283-338; Min_EDGE_Nuc; Table F
EVTPSGTW

SEQ ID NO: 27650 - protein, 10 aa, Severe acute respiratory syndrome coronavirus 2
  REGION 1..10: note = N 232-282; Min_EDGE_Nuc; Table F
TKAYNVTQAF

SEQ ID NO: 27651 - protein, 8 aa, Severe acute respiratory syndrome coronavirus 2
  REGION 1..8: note = N 204-239; Min_EDGE_Nuc; Table F
DAALALLL

SEQ ID NO: 27652 - protein, 10 aa, Severe acute respiratory syndrome coronavirus 2
  REGION 1..10: note = N 283-338; Min_EDGE_Nuc; Table F
QFAPSASAFF

SEQ ID NO: 27653 - protein, 9 aa, Severe acute respiratory syndrome coronavirus 2
  REGION 1..9: note = N 345-375; Min_EDGE_Nuc; Table F
LLNKHIDAY

SEQ ID NO: 27654 - protein, 9 aa, Severe acute respiratory syndrome coronavirus 2
  REGION 1..9: note = N 232-282; Min_EDGE_Nuc; Table F
QQQGQTVTK

SEQ ID NO: 27655 - protein, 8 aa, Severe acute respiratory syndrome coronavirus 2
  REGION 1..8: note = N 283-338; Min_EDGE_Nuc; Table F
SAFFGMSR

SEQ ID NO: 27656 - protein, 11 aa, Severe acute respiratory syndrome coronavirus 2
  REGION 1..11: note = N 204-239; Min_EDGE_Nuc; Table F
ALLLLDRLNQL

SEQ ID NO: 27657 - protein, 8 aa, Severe acute respiratory syndrome coronavirus 2
  REGION 1..8: note = N 368-408; Min_EDGE_Nuc; Table F
ETQALPQR

SEQ ID NO: 27658 - protein, 9 aa, Severe acute respiratory syndrome coronavirus 2
  REGION 1..9: note = N 39-94; Min_EDGE_Nuc; Table F
NTASWFTAL

SEQ ID NO: 27659 - protein, 10 aa, Severe acute respiratory syndrome coronavirus 2
  REGION 1..10: note = N 232-282; Min_EDGE_Nuc; Table F
SAAEASKKPR

SEQ ID NO: 27660 - protein, 11 aa, Severe acute respiratory syndrome coronavirus 2
  REGION 1..11: note = N 39-94; Min_EDGE_Nuc; Table F
NSSPDDQIGYY

SEQ ID NO: 27661 - protein, 9 aa, Severe acute respiratory syndrome coronavirus 2
  REGION 1..9: note = N 128-174; Min_EDGE_Nuc; Table F
TRNPANNAA

SEQ ID NO: 27662 - protein, 11 aa, Severe acute respiratory syndrome coronavirus 2
  REGION 1..11: note = N 283-338; Min_EDGE_Nuc; Table F
IGMEVTPSGTW

SEQ ID NO: 27663 - protein, 9 aa, Severe acute respiratory syndrome coronavirus 2
  REGION 1..9: note = N 128-174; Min_EDGE_Nuc; Table F
LPQGTTLPK

SEQ ID NO: 27664 - protein, 10 aa, Severe acute respiratory syndrome coronavirus 2
  REGION 1..10: note = N 204-239; Min_EDGE_Nuc; Table F
ALALLLLDRL

SEQ ID NO: 27665 - protein, 10 aa, Severe acute respiratory syndrome coronavirus 2
  REGION 1..10: note = N 283-338; Min_EDGE_Nuc; Table F
QELIRQGTDY

SEQ ID NO: 27666 - protein, 10 aa, Severe acute respiratory syndrome coronavirus 2
  REGION 1..10: note = N 232-282; Min_EDGE_Nuc; Table F
QQQQGQTVTK

SEQ ID NO: 27667 - protein, 9 aa, Severe acute respiratory syndrome coronavirus 2
  REGION 1..9: note = N 232-282; Min_EDGE_Nuc; Table F
GQTVTKKSA

SEQ ID NO: 27668 - protein, 8 aa, Severe acute respiratory syndrome coronavirus 2
  REGION 1..8: note = N 368-408; Min_EDGE_Nuc; Table F
TVTLLPAA

SEQ ID NO: 27669 - protein, 9 aa, Severe acute respiratory syndrome coronavirus 2
  REGION 1..9: note = N 283-338; Min_EDGE_Nuc; Table F
SAFFGMSRI

SEQ ID NO: 27670 - protein, 10 aa, Severe acute respiratory syndrome coronavirus 2
  REGION 1..10: note = N 204-239; Min_EDGE_Nuc; Table F
MAGNGGDAAL

SEQ ID NO: 27671 - protein, 9 aa, Severe acute respiratory syndrome coronavirus 2
  REGION 1..9: note = N 283-338; Min_EDGE_Nuc; Table F
AQFAPSASA

SEQ ID NO: 27672 - protein, 8 aa, Severe acute respiratory syndrome coronavirus 2
  REGION 1..8: note = N 368-408; Min_EDGE_Nuc; Table F
KADETQAL

SEQ ID NO: 27673 - protein, 9 aa, Severe acute respiratory syndrome coronavirus 2
  REGION 1..9: note = N 345-375; Min_EDGE_Nuc; Table F
KHIDAYKTF

SEQ ID NO: 27674 - protein, 9 aa, Severe acute respiratory syndrome coronavirus 2
  REGION 1..9: note = N 39-94; Min_EDGE_Nuc; Table F
FTALTQHGK

SEQ ID NO: 27675 - protein, 10 aa, Severe acute respiratory syndrome coronavirus 2
  REGION 1..10: note = N 232-282; Min_EDGE_Nuc; Table F
QQQGQTVTKK

SEQ ID NO: 27676 - protein, 11 aa, Severe acute respiratory syndrome coronavirus 2
  REGION 1..11: note = N 232-282; Min_EDGE_Nuc; Table F
KSAAEASKKPR

SEQ ID NO: 27677 - protein, 9 aa, Severe acute respiratory syndrome coronavirus 2
  REGION 1..9: note = N 368-408; Min_EDGE_Nuc; Table F
DETQALPQR

SEQ ID NO: 27678 - protein, 10 aa, Severe acute respiratory syndrome coronavirus 2
  REGION 1..10: note = N 39-94; Min_EDGE_Nuc; Table F
SSPDDQIGYY

SEQ ID NO: 27679 - protein, 11 aa, Severe acute respiratory syndrome coronavirus 2
  REGION 1..11: note = N 283-338; Min_EDGE_Nuc; Table F
EVTPSGTWLTY

SEQ ID NO: 27680 - protein, 8 aa, Severe acute respiratory syndrome coronavirus 2
  REGION 1..8: note = N 368-408; Min_EDGE_Nuc; Table F
RQKKQQTV

SEQ ID NO: 27681 - protein, 11 aa, Severe acute respiratory syndrome coronavirus 2
  REGION 1..11: note = N 39-94; Min_EDGE_Nuc; Table F
SSPDDQIGYYR

SEQ ID NO: 27682 - protein, 11 aa, Severe acute respiratory syndrome coronavirus 2
  REGION 1..11: note = N 128-174; Min_EDGE_Nuc; Table F
IVLQLPQGTTL

SEQ ID NO: 27683 - protein, 9 aa, Severe acute respiratory syndrome coronavirus 2
  REGION 1..9: note = N 368-408; Min_EDGE_Nuc; Table F
KKADETQAL

SEQ ID NO: 27684 - protein, 10 aa, Severe acute respiratory syndrome coronavirus 2
  REGION 1..10: note = N 128-174; Min_EDGE_Nuc; Table F
QLPQGTTLPK

SEQ ID NO: 27685 - protein, 9 aa, Severe acute respiratory syndrome coronavirus 2
  REGION 1..9: note = N 283-338; Min_EDGE_Nuc; Table F
RQGTDYKHW

SEQ ID NO: 27686 - protein, 9 aa, Severe acute respiratory syndrome coronavirus 2
  REGION 1..9: note = N 39-94; Min_EDGE_Nuc; Table F
DDQIGYYRR

SEQ ID NO: 27687 - protein, 9 aa, Severe acute respiratory syndrome coronavirus 2
  REGION 1..9: note = N 204-239; Min_EDGE_Nuc; Table F
AGNGGDAAL

SEQ ID NO: 27688 - protein, 9 aa, Severe acute respiratory syndrome coronavirus 2
  REGION 1..9: note = N 232-282; Min_EDGE_Nuc; Table F
RTATKAYNV

SEQ ID NO: 27689 - protein, 10 aa, Severe acute respiratory syndrome coronavirus 2
  REGION 1..10: note = N 345-375; Min_EDGE_Nuc; Table F
ILLNKHIDAY

SEQ ID NO: 27690 - protein, 8 aa, Severe acute respiratory syndrome coronavirus 2
  REGION 1..8: note = N 283-338; Min_EDGE_Nuc; Table F
LIRQGTDY

SEQ ID NO: 27691 - protein, 10 aa, Severe acute respiratory syndrome coronavirus 2
  REGION 1..10: note = N 128-174; Min_EDGE_Nuc; Table F
NTPKDHIGTR

SEQ ID NO: 27692 - protein, 9 aa, Severe acute respiratory syndrome coronavirus 2
  REGION 1..9: note = N 232-282; Min_EDGE_Nuc; Table F
EASKKPRQK

SEQ ID NO: 27693 - protein, 9 aa, Severe acute respiratory syndrome coronavirus 2
  REGION 1..9: note = N 283-338; Min_EDGE_Nuc; Table F
FAPSASAFF

SEQ ID NO: 27694 - protein, 8 aa, Severe acute respiratory syndrome coronavirus 2
  REGION 1..8: note = N 39-94; Min_EDGE_Nuc; Table F
LPNNTASW

SEQ ID NO: 27695 - protein, 10 aa, Severe acute respiratory syndrome coronavirus 2
  REGION 1..10: note = N 283-338; Min_EDGE_Nuc; Table F
SASAFFGMSR

SEQ ID NO: 27696 - protein, 8 aa, Severe acute respiratory syndrome coronavirus 2
  REGION 1..8: note = N 128-174; Min_EDGE_Nuc; Table F
NAAIVLQL

SEQ ID NO: 27697 - protein, 10 aa, Severe acute respiratory syndrome coronavirus 2
  REGION 1..10: note = N 232-282; Min_EDGE_Nuc; Table F
RQKRTATKAY

SEQ ID NO: 27698 - protein, 10 aa, Severe acute respiratory syndrome coronavirus 2
  REGION 1..10: note = N 283-338; Min_EDGE_Nuc; Table F
YKHWPQIAQF

SEQ ID NO: 27699 - protein, 9 aa, Severe acute respiratory syndrome coronavirus 2
  REGION 1..9: note = N 232-282; Min_EDGE_Nuc; Table F
QKRTATKAY

SEQ ID NO: 27700 - protein, 9 aa, Severe acute respiratory syndrome coronavirus 2
  REGION 1..9: note = N 368-408; Min_EDGE_Nuc; Table F
TQALPQRQK

SEQ ID NO: 27701 - protein, 10 aa, Severe acute respiratory syndrome coronavirus 2
  REGION 1..10: note = N 283-338; Min_EDGE_Nuc; Table F
APSASAFFGM

SEQ ID NO: 27702 - protein, 10 aa, Severe acute respiratory syndrome coronavirus 2
  REGION 1..10: note = ORF3a 12-55; Min_EDGE_ORF3a; Table F
TPSDFVRATA

SEQ ID NO: 27703 - protein, 9 aa, Severe acute respiratory syndrome coronavirus 2
  REGION 1..9: note = ORF3a 198-254; Min_EDGE_ORF3a; Table F
IVDEPEEHV

SEQ ID NO: 27704 - protein, 10 aa, Severe acute respiratory syndrome coronavirus 2
  REGION 1..10: note = ORF3a 168-198; Min_EDGE_ORF3a; Table F
YQIGGYTEKW

SEQ ID NO: 27705 - protein, 11 aa, Severe acute respiratory syndrome coronavirus 2
  REGION 1..11: note = ORF3a 168-198; Min_EDGE_ORF3a; Table F
GTTSPISEHDY

SEQ ID NO: 27706 - protein, 10 aa, Severe acute respiratory syndrome coronavirus 2
  REGION 1..10: note = ORF3a 168-198; Min_EDGE_ORF3a; Table F
TTSPISEHDY

SEQ ID NO: 27707 - protein, 10 aa, Severe acute respiratory syndrome coronavirus 2
  REGION 1..10: note = ORF3a 12-55; Min_EDGE_ORF3a; Table F
EIKDATPSDF

SEQ ID NO: 27708 - protein, 9 aa, Severe acute respiratory syndrome coronavirus 2
  REGION 1..9: note = ORF3a 198-254; Min_EDGE_ORF3a; Table F
EEHVQIHTI

SEQ ID NO: 27709 - protein, 9 aa, Severe acute respiratory syndrome coronavirus 2
  REGION 1..9: note = ORF3a 101-152; Min_EDGE_ORF3a; Table F
QSINFVRII

SEQ ID NO: 27710 - protein, 8 aa, Severe acute respiratory syndrome coronavirus 2
  REGION 1..8: note = ORF3a 52-85; Min_EDGE_ORF3a; Table F
SASKIITL

SEQ ID NO: 27711 - protein, 9 aa, Severe acute respiratory syndrome coronavirus 2
  REGION 1..9: note = ORF3a 198-254; Min_EDGE_ORF3a; Table F
HSYFTSDYY

SEQ ID NO: 27712 - protein, 11 aa, Severe acute respiratory syndrome coronavirus 2
  REGION 1..11: note = ORF3a 198-254; Min_EDGE_ORF3a; Table F
IVDEPEEHVQI

SEQ ID NO: 27713 - protein, 8 aa, Severe acute respiratory syndrome coronavirus 2
  REGION 1..8: note = ORF3a 101-152; Min_EDGE_ORF3a; Table F
RSKNPLLY

SEQ ID NO: 27714 - protein, 9 aa, Severe acute respiratory syndrome coronavirus 2
  REGION 1..9: note = ORF3a 12-55; Min_EDGE_ORF3a; Table F
ATIPIQASL

SEQ ID NO: 27715 - protein, 8 aa, Severe acute respiratory syndrome coronavirus 2
  REGION 1..8: note = ORF3a 198-254; Min_EDGE_ORF3a; Table F
EHVQIHTI

SEQ ID NO: 27716 - protein, 9 aa, Severe acute respiratory syndrome coronavirus 2
  REGION 1..9: note = ORF3a 52-85; Min_EDGE_ORF3a; Table F
ITLKKRWQL

SEQ ID NO: 27717 - protein, 8 aa, Severe acute respiratory syndrome coronavirus 2
  REGION 1..8: note = ORF3a 198-254; Min_EDGE_ORF3a; Table F
SYFTSDYY

SEQ ID NO: 27718 - protein, 10 aa, Severe acute respiratory syndrome coronavirus 2
  REGION 1..10: note = ORF3a 198-254; Min_EDGE_ORF3a; Table F
YFTSDYYQLY

SEQ ID NO: 27719 - protein, 11 aa, Severe acute respiratory syndrome coronavirus 2
  REGION 1..11: note = ORF3a 198-254; Min_EDGE_ORF3a; Table F
STDTGVEHVTF

SEQ ID NO: 27720 - protein, 9 aa, Severe acute respiratory syndrome coronavirus 2
  REGION 1..9: note = ORF3a 12-55; Min_EDGE_ORF3a; Table F
DATPSDFVR

SEQ ID NO: 27721 - protein, 9 aa, Severe acute respiratory syndrome coronavirus 2
  REGION 1..9: note = ORF3a 168-198; Min_EDGE_ORF3a; Table F
EHDYQIGGY

SEQ ID NO: 27722 - protein, 9 aa, Severe acute respiratory syndrome coronavirus 2
  REGION 1..9: note = ORF3a 198-254; Min_EDGE_ORF3a; Table F
STDTGVEHV

SEQ ID NO: 27723 - protein, 8 aa, Severe acute respiratory syndrome coronavirus 2
  REGION 1..8: note = ORF3a 168-198; Min_EDGE_ORF3a; Table F
IGGYTEKW

SEQ ID NO: 27724 - protein, 11 aa, Severe acute respiratory syndrome coronavirus 2
  REGION 1..11: note = ORF3a 12-55; Min_EDGE_ORF3a; Table F
IPIQASLPFGW

SEQ ID NO: 27725 - protein, 11 aa, Severe acute respiratory syndrome coronavirus 2
  REGION 1..11: note = ORF3a 12-55; Min_EDGE_ORF3a; Table F
GEIKDATPSDF

SEQ ID NO: 27726 - protein, 10 aa, Severe acute respiratory syndrome coronavirus 2
  REGION 1..10: note = ORF3a 168-198; Min_EDGE_ORF3a; Table F
SPISEHDYQI

SEQ ID NO: 27727 - protein, 9 aa, Severe acute respiratory syndrome coronavirus 2
  REGION 1..9: note = ORF3a 101-152; Min_EDGE_ORF3a; Table F
ALVYFLQSI

SEQ ID NO: 27728 - protein, 9 aa, Severe acute respiratory syndrome coronavirus 2
  REGION 1..9: note = ORF3a 12-55; Min_EDGE_ORF3a; Table F
TPSDFVRAT

SEQ ID NO: 27729 - protein, 9 aa, Severe acute respiratory syndrome coronavirus 2
  REGION 1..9: note = ORF3a 101-152; Min_EDGE_ORF3a; Table F
NPLLYDANY

SEQ ID NO: 27730 - protein, 10 aa, Severe acute respiratory syndrome coronavirus 2
  REGION 1..10: note = ORF3a 168-198; Min_EDGE_ORF3a; Table F
SEHDYQIGGY

SEQ ID NO: 27731 - protein, 9 aa, Severe acute respiratory syndrome coronavirus 2
  REGION 1..9: note = ORF3a 101-152; Min_EDGE_ORF3a; Table F
FLQSINFVR

SEQ ID NO: 27732 - protein, 9 aa, Severe acute respiratory syndrome coronavirus 2
  REGION 1..9: note = ORF3a 198-254; Min_EDGE_ORF3a; Table F
HVTFFIYNK

SEQ ID NO: 27733 - protein, 8 aa, Severe acute respiratory syndrome coronavirus 2
  REGION 1..8: note = ORF3a 52-85; Min_EDGE_ORF3a; Table F
TLKKRWQL

SEQ ID NO: 27734 - protein, 11 aa, Severe acute respiratory syndrome coronavirus 2
  REGION 1..11: note = ORF3a 198-254; Min_EDGE_ORF3a; Table F
SYFTSDYYQLY

SEQ ID NO: 27735 - protein, 11 aa, Severe acute respiratory syndrome coronavirus 2
  REGION 1..11: note = ORF3a 198-254; Min_EDGE_ORF3a; Table F
QLSTDTGVEHV

SEQ ID NO: 27736 - protein, 8 aa, Severe acute respiratory syndrome coronavirus 2
  REGION 1..8: note = ORF3a 12-55; Min_EDGE_ORF3a; Table F
LPFGWLIV

SEQ ID NO: 27737 - protein, 9 aa, Severe acute respiratory syndrome coronavirus 2
  REGION 1..9: note = ORF3a 198-254; Min_EDGE_ORF3a; Table F
VTFFIYNKI

SEQ ID NO: 27738 - protein, 8 aa, Severe acute respiratory syndrome coronavirus 2
  REGION 1..8: note = ORF3a 198-254; Min_EDGE_ORF3a; Table F
TSDYYQLY

SEQ ID NO: 27739 - protein, 9 aa, Severe acute respiratory syndrome coronavirus 2
  REGION 1..9: note = ORF3a 198-254; Min_EDGE_ORF3a; Table F
YFTSDYYQL

SEQ ID NO: 27740 - protein, 8 aa, Severe acute respiratory syndrome coronavirus 2
  REGION 1..8: note = ORF3a 12-55; Min_EDGE_ORF3a; Table F
TPSDFVRA

SEQ ID NO: 27741 - protein, 9 aa, Severe acute respiratory syndrome coronavirus 2
  REGION 1..9: note = ORF3a 168-198; Min_EDGE_ORF3a; Table F
QIGGYTEKW

SEQ ID NO: 27742 - protein, 10 aa, Severe acute respiratory syndrome coronavirus 2
  REGION 1..10: note = ORF3a 198-254; Min_EDGE_ORF3a; Table F
TDTGVEHVTF

SEQ ID NO: 27743 - protein, 9 aa, Severe acute respiratory syndrome coronavirus 2
  REGION 1..9: note = ORF3a 101-152; Min_EDGE_ORF3a; Table F
SINFVRIIM

SEQ ID NO: 27744 - protein, 9 aa, Severe acute respiratory syndrome coronavirus 2
  REGION 1..9: note = ORF3a 52-85; Min_EDGE_ORF3a; Table F
KRWQLALSK

SEQ ID NO: 27745 - protein, 9 aa, Severe acute respiratory syndrome coronavirus 2
  REGION 1..9: note = ORF3a 12-55; Min_EDGE_ORF3a; Table F
ATATIPIQA

SEQ ID NO: 27746 - protein, 9 aa, Severe acute respiratory syndrome coronavirus 2
  REGION 1..9: note = ORF3a 198-254; Min_EDGE_ORF3a; Table F
TGVEHVTFF

SEQ ID NO: 27747 - protein, 9 aa, Severe acute respiratory syndrome coronavirus 2
  REGION 1..9: note = ORF3a 198-254; Min_EDGE_ORF3a; Table F
TQLSTDTGV

SEQ ID NO: 27748 - protein, 9 aa, Severe acute respiratory syndrome coronavirus 2
  REGION 1..9: note = ORF3a 52-85; Min_EDGE_ORF3a; Table F
ASKIITLKK

SEQ ID NO: 27749 - protein, 10 aa, Severe acute respiratory syndrome coronavirus 2
  REGION 1..10: note = ORF3a 12-55; Min_EDGE_ORF3a; Table F
LPFGWLIVGV

SEQ ID NO: 27750 - protein, 11 aa, Severe acute respiratory syndrome coronavirus 2
  REGION 1..11: note = ORF3a 12-55; Min_EDGE_ORF3a; Table F
EIKDATPSDFV

SEQ ID NO: 27751 - protein, 8 aa, Severe acute respiratory syndrome coronavirus 2
  REGION 1..8: note = N 368-408; Min_EDGE_Nuc_expl.; Table F
KQQTVTLL

SEQ ID NO: 27752 - protein, 8 aa, Severe acute respiratory syndrome coronavirus 2
  REGION 1..8: note = N 128-174; Min_EDGE_Nuc_expl.; Table F
PQGTTLPK

SEQ ID NO: 27753 - protein, 11 aa, Severe acute respiratory syndrome coronavirus 2
  REGION 1..11: note = N 204-239; Min_EDGE_Nuc_expl.; Table F
RMAGNGGDAAL

SEQ ID NO: 27754 - protein, 8 aa, Severe acute respiratory syndrome coronavirus 2
  REGION 1..8: note = N 232-282; Min_EDGE_Nuc_expl.; Table F
NVTQAFGR

SEQ ID NO: 27755 - protein, 11 aa, Severe acute respiratory syndrome coronavirus 2
  REGION 1..11: note = N 232-282; Min_EDGE_Nuc_expl.; Table F
ATKAYNVTQAF

SEQ ID NO: 27756 - protein, 10 aa, Severe acute respiratory syndrome coronavirus 2
  REGION 1..10: note = N 232-282; Min_EDGE_Nuc_expl.; Table F
KAYNVTQAFG

SEQ ID NO: 27757 - protein, 9 aa, Severe acute respiratory syndrome coronavirus 2
  REGION 1..9: note = N 128-174; Min_EDGE_Nuc_expl.; Table F
DHIGTRNPA

SEQ ID NO: 27758 - protein, 9 aa, Severe acute respiratory syndrome coronavirus 2
  REGION 1..9: note = N 368-408; Min_EDGE_Nuc_expl.; Table F
KKQQTVTLL

SEQ ID NO: 27759 - protein, 8 aa, Severe acute respiratory syndrome coronavirus 2
  REGION 1..8: note = N 39-94; Min_EDGE_Nuc_expl.; Table F
DDQIGYYR

SEQ ID NO: 27760 - protein, 8 aa, Severe acute respiratory syndrome coronavirus 2
  REGION 1..8: note = N 232-282; Min_EDGE_Nuc_expl.; Table F
QQQQGQTV

SEQ ID NO: 27761 - protein, 8 aa, Severe acute respiratory syndrome coronavirus 2
  REGION 1..8: note = N 283-338; Min_EDGE_Nuc_expl.; Table F
MSRIGMEV

SEQ ID NO: 27762 - protein, 8 aa, Severe acute respiratory syndrome coronavirus 2
  REGION 1..8: note = N 128-174; Min_EDGE_Nuc_expl.; Table F
QLPQGTTL

SEQ ID NO: 27763 - protein, 10 aa, Severe acute respiratory syndrome coronavirus 2
  REGION 1..10: note = N 39-94; Min_EDGE_Nuc_expl.; Table F
NSSPDDQIGY

SEQ ID NO: 27764 - protein, 9 aa, Severe acute respiratory syndrome coronavirus 2
  REGION 1..9: note = N 283-338; Min_EDGE_Nuc_expl.; Table F
FFGMSRIGM

SEQ ID NO: 27765 - protein, 11 aa, Severe acute respiratory syndrome coronavirus 2
  REGION 1..11: note = N 232-282; Min_EDGE_Nuc_expl.; Table F
QQQQGQTVTKK

SEQ ID NO: 27766 - protein, 11 aa, Severe acute respiratory syndrome coronavirus 2
  REGION 1..11: note = N 39-94; Min_EDGE_Nuc_expl.; Table F
LPNNTASWFTA

SEQ ID NO: 27767 - protein, 8 aa, Severe acute respiratory syndrome coronavirus 2
  REGION 1..8: note = N 39-94; Min_EDGE_Nuc_expl.; Table F
SPDDQIGY

SEQ ID NO: 27768 - protein, 10 aa, Severe acute respiratory syndrome coronavirus 2
  REGION 1..10: note = N 39-94; Min_EDGE_Nuc_expl.; Table F
SPDDQIGYYR

SEQ ID NO: 27769 - protein, 9 aa, Severe acute respiratory syndrome coronavirus 2
  REGION 1..9: note = N 283-338; Min_EDGE_Nuc_expl.; Table F
TDYKHWPQI

SEQ ID NO: 27770 - protein, 9 aa, Severe acute respiratory syndrome coronavirus 2
  REGION 1..9: note = N 232-282; Min_EDGE_Nuc_expl.; Table F
YNVTQAFGR

SEQ ID NO: 27771 - protein, 11 aa, Severe acute respiratory syndrome coronavirus 2
  REGION 1..11: note = N 368-408; Min_EDGE_Nuc_expl.; Table F
KADETQALPQR

SEQ ID NO: 27772 - protein, 9 aa, Severe acute respiratory syndrome coronavirus 2
  REGION 1..9: note = N 128-174; Min_EDGE_Nuc_expl.; Table F
PANNAAIVL

SEQ ID NO: 27773 - protein, 9 aa, Severe acute respiratory syndrome coronavirus 2
  REGION 1..9: note = N 39-94; Min_EDGE_Nuc_expl.; Table F
GLPNNTASW

SEQ ID NO: 27774 - protein, 8 aa, Severe acute respiratory syndrome coronavirus 2
  REGION 1..8: note = N 283-338; Min_EDGE_Nuc_expl.; Table F
FAPSASAF

SEQ ID NO: 27775 - protein, 8 aa, Severe acute respiratory syndrome coronavirus 2
  REGION 1..8: note = N 283-338; Min_EDGE_Nuc_expl.; Table F
FGMSRIGM

SEQ ID NO: 27776 - protein, 10 aa, Severe acute respiratory syndrome coronavirus 2
  REGION 1..10: note = N 283-338; Min_EDGE_Nuc_expl.; Table F
VTPSGTWLTY

SEQ ID NO: 27777 - protein, 8 aa, Severe acute respiratory syndrome coronavirus 2
  REGION 1..8: note = N 204-239; Min_EDGE_Nuc_expl.; Table F
LLDRLNQL

SEQ ID NO: 27778 - protein, 8 aa, Severe acute respiratory syndrome coronavirus 2
  REGION 1..8: note = N 283-338; Min_EDGE_Nuc_expl.; Table F
APSASAFF

SEQ ID NO: 27779 - protein, 9 aa, Severe acute respiratory syndrome coronavirus 2
  REGION 1..9: note = N 368-408; Min_EDGE_Nuc_expl.; Table F
QTVTLLPAA

SEQ ID NO: 27780 - protein, 10 aa, Severe acute respiratory syndrome coronavirus 2
  REGION 1..10: note = N 204-239; Min_EDGE_Nuc_expl.; Table F
DRLNQLESKM

SEQ ID NO: 27781 - protein, 9 aa, Severe acute respiratory syndrome coronavirus 2
  REGION 1..9: note = N 204-239; Min_EDGE_Nuc_expl.; Table F
NGGDAALAL

SEQ ID NO: 27782 - protein, 9 aa, Severe acute respiratory syndrome coronavirus 2
  REGION 1..9: note = N 204-239; Min_EDGE_Nuc_expl.; Table F
DAALALLLL

SEQ ID NO: 27783 - protein, 8 aa, Severe acute respiratory syndrome coronavirus 2
  REGION 1..8: note = N 232-282; Min_EDGE_Nuc_expl.; Table F
TATKAYNV

SEQ ID NO: 27784 - protein, 9 aa, Severe acute respiratory syndrome coronavirus 2
  REGION 1..9: note = N 232-282; Min_EDGE_Nuc_expl.; Table F
QQGQTVTKK

SEQ ID NO: 27785 - protein, 11 aa, Severe acute respiratory syndrome coronavirus 2
  REGION 1..11: note = N 39-94; Min_EDGE_Nuc_expl.; Table F
LTQHGKEDLKF

SEQ ID NO: 27786 - protein, 8 aa, Severe acute respiratory syndrome coronavirus 2
  REGION 1..8: note = N 283-338; Min_EDGE_Nuc_expl.; Table F
AFFGMSRI

SEQ ID NO: 27787 - protein, 10 aa, Severe acute respiratory syndrome coronavirus 2
  REGION 1..10: note = N 368-408; Min_EDGE_Nuc_expl.; Table F
RQKKQQTVTL

SEQ ID NO: 27788 - protein, 9 aa, Severe acute respiratory syndrome coronavirus 2
  REGION 1..9: note = N 128-174; Min_EDGE_Nuc_expl.; Table F
NNAAIVLQL

SEQ ID NO: 27789 - protein, 10 aa, Severe acute respiratory syndrome coronavirus 2
  REGION 1..10: note = N 283-338; Min_EDGE_Nuc_expl.; Table F
AFFGMSRIGM

SEQ ID NO: 27790 - protein, 11 aa, Severe acute respiratory syndrome coronavirus 2
  REGION 1..11: note = N 128-174; Min_EDGE_Nuc_expl.; Table F
LQLPQGTTLPK

SEQ ID NO: 27791 - protein, 9 aa, Severe acute respiratory syndrome coronavirus 2
  REGION 1..9: note = N 39-94; Min_EDGE_Nuc_expl.; Table F
SWFTALTQH

SEQ ID NO: 27792 - protein, 11 aa, Severe acute respiratory syndrome coronavirus 2
  REGION 1..11: note = N 283-338; Min_EDGE_Nuc_expl.; Table F
GMSRIGMEVTP

SEQ ID NO: 27793 - protein, 9 aa, Severe acute respiratory syndrome coronavirus 2
  REGION 1..9: note = N 368-408; Min_EDGE_Nuc_expl.; Table F
QKKQQTVTL

SEQ ID NO: 27794 - protein, 9 aa, Severe acute respiratory syndrome coronavirus 2
  REGION 1..9: note = N 232-282; Min_EDGE_Nuc_expl.; Table F
TKAYNVTQA

SEQ ID NO: 27795 - protein, 11 aa, Severe acute respiratory syndrome coronavirus 2
  REGION 1..11: note = N 345-375; Min_EDGE_Nuc_expl.; Table F
VILLNKHIDAY

SEQ ID NO: 27796 - protein, 10 aa, Severe acute respiratory syndrome coronavirus 2
  REGION 1..10: note = N 39-94; Min_EDGE_Nuc_expl.; Table F
QGLPNNTASW

SEQ ID NO: 27797 - protein, 10 aa, Severe acute respiratory syndrome coronavirus 2
  REGION 1..10: note = N 39-94; Min_EDGE_Nuc_expl.; Table F
HGKEDLKFPR

SEQ ID NO: 27798 - protein, 9 aa, Severe acute respiratory syndrome coronavirus 2
  REGION 1..9: note = N 368-408; Min_EDGE_Nuc_expl.; Table F
KQQTVTLLP

SEQ ID NO: 27799 - protein, 11 aa, Severe acute respiratory syndrome coronavirus 2
  REGION 1..11: note = N 368-408; Min_EDGE_Nuc_expl.; Table F
TLLPAADLDDF

SEQ ID NO: 27800 - protein, 9 aa, Severe acute respiratory syndrome coronavirus 2
  REGION 1..9: note = N 232-282; Min_EDGE_Nuc_expl.; Table F
ATKAYNVTQ

SEQ ID NO: 27801 - protein, 11 aa, Severe acute respiratory syndrome coronavirus 2
  REGION 1..11: note = N 368-408; Min_EDGE_Nuc_expl.; Table F
LPQRQKKQQTV

SEQ ID NO: 27802 - protein, 9 aa, Severe acute respiratory syndrome coronavirus 2
  REGION 1..9: note = N 128-174; Min_EDGE_Nuc_expl.; Table F
TEGALNTPK

SEQ ID NO: 27803 - protein, 9 aa, Severe acute respiratory syndrome coronavirus 2
  REGION 1..9: note = N 368-408; Min_EDGE_Nuc_expl.; Table F
ETQALPQRQ

SEQ ID NO: 27804 - protein, 9 aa, Severe acute respiratory syndrome coronavirus 2
  REGION 1..9: note = N 283-338; Min_EDGE_Nuc_expl.; Table F
EVTPSGTWL

SEQ ID NO: 27805 - protein, 9 aa, Severe acute respiratory syndrome coronavirus 2
  REGION 1..9: note = N 368-408; Min_EDGE_Nuc_expl.; Table F
QQTVTLLPA

SEQ ID NO: 27806 - protein, 11 aa, Severe acute respiratory syndrome coronavirus 2
  REGION 1..11: note = N 128-174; Min_EDGE_Nuc_expl.; Table F
LNTPKDHIGTR

SEQ ID NO: 27807 - protein, 9 aa, Severe acute respiratory syndrome coronavirus 2
  REGION 1..9: note = N 128-174; Min_EDGE_Nuc_expl.; Table F
NPANNAAIV

SEQ ID NO: 27808 - protein, 11 aa, Severe acute respiratory syndrome coronavirus 2
  REGION 1..11: note = N 128-174; Min_EDGE_Nuc_expl.; Table F
VATEGALNTPK

SEQ ID NO: 27809 - protein, 8 aa, Severe acute respiratory syndrome coronavirus 2
  REGION 1..8: note = N 128-174; Min_EDGE_Nuc_expl.; Table F
NPANNAAI

SEQ ID NO: 27810 - protein, 10 aa, Severe acute respiratory syndrome coronavirus 2
  REGION 1..10: note = N 283-338; Min_EDGE_Nuc_expl.; Table F
TDYKHWPQIA

SEQ ID NO: 27811 - protein, 8 aa, Severe acute respiratory syndrome coronavirus 2
  REGION 1..8: note = N 39-94; Min_EDGE_Nuc_expl.; Table F
PDDQIGYY

SEQ ID NO: 27812 - protein, 9 aa, Severe acute respiratory syndrome coronavirus 2
  REGION 1..9: note = N 283-338; Min_EDGE_Nuc_expl.; Table F
QIAQFAPSA

SEQ ID NO: 27813 - protein, 8 aa, Severe acute respiratory syndrome coronavirus 2
  REGION 1..8: note = N 345-375; Min_EDGE_Nuc_expl.; Table F
LNKHIDAY

SEQ ID NO: 27814 - protein, 11 aa, Severe acute respiratory syndrome coronavirus 2
  REGION 1..11: note = N 345-375; Min_EDGE_Nuc_expl.; Table F
AYKTFPPTEPK

SEQ ID NO: 27815 - protein, 8 aa, Severe acute respiratory syndrome coronavirus 2
  REGION 1..8: note = N 232-282; Min_EDGE_Nuc_expl.; Table F
QQGQTVTK

SEQ ID NO: 27816 - protein, 9 aa, Severe acute respiratory syndrome coronavirus 2
  REGION 1..9: note = N 232-282; Min_EDGE_Nuc_expl.; Table F
QQQQGQTVT

SEQ ID NO: 27817 - protein, 9 aa, Severe acute respiratory syndrome coronavirus 2
  REGION 1..9: note = N 283-338; Min_EDGE_Nuc_expl.; Table F
SRIGMEVTP

SEQ ID NO: 27818 - protein, 10 aa, Severe acute respiratory syndrome coronavirus 2
  REGION 1..10: note = N 232-282; Min_EDGE_Nuc_expl.; Table F
AYNVTQAFGR

SEQ ID NO: 27819 - protein, 9 aa, Severe acute respiratory syndrome coronavirus 2
  REGION 1..9: note = N 368-408; Min_EDGE_Nuc_expl.; Table F
QALPQRQKK

SEQ ID NO: 27820 - protein, 10 aa, Severe acute respiratory syndrome coronavirus 2
  REGION 1..10: note = N 128-174; Min_EDGE_Nuc_expl.; Table F
TRNPANNAAI

SEQ ID NO: 27821 - protein, 8 aa, Severe acute respiratory syndrome coronavirus 2
  REGION 1..8: note = N 283-338; Min_EDGE_Nuc_expl.; Table F
VTPSGTWL

SEQ ID NO: 27822 - protein, 9 aa, Severe acute respiratory syndrome coronavirus 2
  REGION 1..9: note = N 39-94; Min_EDGE_Nuc_expl.; Table F
LPNNTASWF

SEQ ID NO: 27823 - protein, 9 aa, Severe acute respiratory syndrome coronavirus 2
  REGION 1..9: note = N 99-118; Min_EDGE_Nuc_expl.; Table F
LSPRWYFYY

SEQ ID NO: 27824 - protein, 10 aa, Severe acute respiratory syndrome coronavirus 2
  REGION 1..10: note = N 232-282; Min_EDGE_Nuc_expl.; Table F
GQQQQGQTVT

SEQ ID NO: 27825 - protein, 11 aa, Severe acute respiratory syndrome coronavirus 2
  REGION 1..11: note = N 283-338; Min_EDGE_Nuc_expl.; Table F
DQELIRQGTDY

SEQ ID NO: 27826 - protein, 9 aa, Severe acute respiratory syndrome coronavirus 2
  REGION 1..9: note = N 283-338; Min_EDGE_Nuc_expl.; Table F
LIRQGTDYK

SEQ ID NO: 27827 - protein, 10 aa, Severe acute respiratory syndrome coronavirus 2
  REGION 1..10: note = N 368-408; Min_EDGE_Nuc_expl.; Table F
KADETQALPQ

SEQ ID NO: 27828 - protein, 11 aa, Severe acute respiratory syndrome coronavirus 2
  REGION 1..11: note = N 204-239; Min_EDGE_Nuc_expl.; Table F
RLNQLESKMSG

SEQ ID NO: 27829 - protein, 9 aa, Severe acute respiratory syndrome coronavirus 2
  REGION 1..9: note = N 232-282; Min_EDGE_Nuc_expl.; Table F
VTKKSAAEA

SEQ ID NO: 27830 - protein, 8 aa, Severe acute respiratory syndrome coronavirus 2
  REGION 1..8: note = N 368-408; Min_EDGE_Nuc_expl.; Table F
KKQQTVTL

SEQ ID NO: 27831 - protein, 8 aa, Severe acute respiratory syndrome coronavirus 2
  REGION 1..8: note = N 368-408; Min_EDGE_Nuc_expl.; Table F
QALPQRQK

SEQ ID NO: 27832 - protein, 8 aa, Severe acute respiratory syndrome coronavirus 2
  REGION 1..8: note = N 232-282; Min_EDGE_Nuc_expl.; Table F
QGQTVTKK

SEQ ID NO: 27833 - protein, 10 aa, Severe acute respiratory syndrome coronavirus 2
  REGION 1..10: note = N 283-338; Min_EDGE_Nuc_expl.; Table F
FGMSRIGMEV

SEQ ID NO: 27834 - protein, 8 aa, Severe acute respiratory syndrome coronavirus 2
  REGION 1..8: note = N 345-375; Min_EDGE_Nuc_expl.; Table F
KTFPPTEP

SEQ ID NO: 27835 - protein, 10 aa, Severe acute respiratory syndrome coronavirus 2
  REGION 1..10: note = N 232-282; Min_EDGE_Nuc_expl.; Table F
YNVTQAFGRR

SEQ ID NO: 27836 - protein, 10 aa, Severe acute respiratory syndrome coronavirus 2
  REGION 1..10: note = N 283-338; Min_EDGE_Nuc_expl.; Table F
ELIRQGTDYK

SEQ ID NO: 27837 - protein, 11 aa, Severe acute respiratory syndrome coronavirus 2
  REGION 1..11: note = N 283-338; Min_EDGE_Nuc_expl.; Table F
WPQIAQFAPSA

SEQ ID NO: 27838 - protein, 11 aa, Severe acute respiratory syndrome coronavirus 2
  REGION 1..11: note = N 368-408; Min_EDGE_Nuc_expl.; Table F
ETQALPQRQKK

SEQ ID NO: 27839 - protein, 9 aa, Severe acute respiratory syndrome coronavirus 2
  REGION 1..9: note = ORF3a 101-152; Min_EDGE_ORF3a_expl.; Table F
SKNPLLYDA

SEQ ID NO: 27840 - protein, 11 aa, Severe acute respiratory syndrome coronavirus 2
  REGION 1..11: note = ORF3a 168-198; Min_EDGE_ORF3a_expl.; Table F
ISEHDYQIGGY

SEQ ID NO: 27841 - protein, 9 aa, Severe acute respiratory syndrome coronavirus 2
  REGION 1..9: note = ORF3a 12-55; Min_EDGE_ORF3a_expl.; Table F
ATPSDFVRA

SEQ ID NO: 27842 - protein, 10 aa, Severe acute respiratory syndrome coronavirus 2
  REGION 1..10: note = ORF3a 101-152; Min_EDGE_ORF3a_expl.; Table F
SINFVRIIMR

SEQ ID NO: 27843 - protein, 10 aa, Severe acute respiratory syndrome coronavirus 2
  REGION 1..10: note = ORF3a 52-85; Min_EDGE_ORF3a_expl.; Table F
SASKIITLKK

SEQ ID NO: 27844 - protein, 8 aa, Severe acute respiratory syndrome coronavirus 2
  REGION 1..8: note = ORF3a 198-254; Min_EDGE_ORF3a_expl.; Table F
VEHVTFFI

SEQ ID NO: 27845 - protein, 9 aa, Severe acute respiratory syndrome coronavirus 2
  REGION 1..9: note = ORF3a 12-55; Min_EDGE_ORF3a_expl.; Table F
IPIQASLPF

SEQ ID NO: 27846 - protein, 11 aa, Severe acute respiratory syndrome coronavirus 2
  REGION 1..11: note = ORF3a 12-55; Min_EDGE_ORF3a_expl.; Table F
SLPFGWLIVGV

SEQ ID NO: 27847 - protein, 9 aa, Severe acute respiratory syndrome coronavirus 2
  REGION 1..9: note = ORF3a 52-85; Min_EDGE_ORF3a_expl.; Table F
LALSKGVHF

SEQ ID NO: 27848 - protein, 8 aa, Severe acute respiratory syndrome coronavirus 2
  REGION 1..8: note = ORF3a 198-254; Min_EDGE_ORF3a_expl.; Table F
TGVEHVTF

SEQ ID NO: 27849 - protein, 10 aa, Severe acute respiratory syndrome coronavirus 2
  REGION 1..10: note = ORF3a 101-152; Min_EDGE_ORF3a_expl.; Table F
FLQSINFVRI

SEQ ID NO: 27850 - protein, 8 aa, Severe acute respiratory syndrome coronavirus 2
  REGION 1..8: note = ORF3a 101-152; Min_EDGE_ORF3a_expl.; Table F
YFLQSINF

SEQ ID NO: 27851 - protein, 10 aa, Severe acute respiratory syndrome coronavirus 2
  REGION 1..10: note = ORF3a 198-254; Min_EDGE_ORF3a_expl.; Table F
SYFTSDYYQL

SEQ ID NO: 27852 - protein, 10 aa, Severe acute respiratory syndrome coronavirus 2
  REGION 1..10: note = ORF3a 198-254; Min_EDGE_ORF3a_expl.; Table F
KIVDEPEEHV

SEQ ID NO: 27853 - protein, 10 aa, Severe acute respiratory syndrome coronavirus 2
  REGION 1..10: note = ORF3a 198-254; Min_EDGE_ORF3a_expl.; Table F
LHSYFTSDYY

SEQ ID NO: 27854 - protein, 9 aa, Severe acute respiratory syndrome coronavirus 2
  REGION 1..9: note = ORF3a 168-198; Min_EDGE_ORF3a_expl.; Table F
YQIGGYTEK

SEQ ID NO: 27855 - protein, 9 aa, Severe acute respiratory syndrome coronavirus 2
  REGION 1..9: note = ORF3a 12-55; Min_EDGE_ORF3a_expl.; Table F
IQASLPFGW

SEQ ID NO: 27856 - protein, 9 aa, Severe acute respiratory syndrome coronavirus 2
  REGION 1..9: note = ORF3a 12-55; Min_EDGE_ORF3a_expl.; Table F
SDFVRATAT

SEQ ID NO: 27857 - protein, 9 aa, Severe acute respiratory syndrome coronavirus 2
  REGION 1..9: note = ORF3a 52-85; Min_EDGE_ORF3a_expl.; Table F
KIITLKKRW

SEQ ID NO: 27858 - protein, 9 aa, Severe acute respiratory syndrome coronavirus 2
  REGION 1..9: note = ORF3a 101-152; Min_EDGE_ORF3a_expl.; Table F
LQSINFVRI

SEQ ID NO: 27859 - protein, 9 aa, Severe acute respiratory syndrome coronavirus 2
  REGION 1..9: note = ORF3a 12-55; Min_EDGE_ORF3a_expl.; Table F
ASLPFGWLI

SEQ ID NO: 27860 - protein, 8 aa, Severe acute respiratory syndrome coronavirus 2
  REGION 1..8: note = ORF3a 198-254; Min_EDGE_ORF3a_expl.; Table F
YQLYSTQL

SEQ ID NO: 27861 - protein, 9 aa, Severe acute respiratory syndrome coronavirus 2
  REGION 1..9: note = ORF3a 101-152; Min_EDGE_ORF3a_expl.; Table F
CRSKNPLLY

SEQ ID NO: 27862 - protein, 11 aa, Severe acute respiratory syndrome coronavirus 2
  REGION 1..11: note = ORF3a 198-254; Min_EDGE_ORF3a_expl.; Table F
VLHSYFTSDYY

SEQ ID NO: 27863 - protein, 11 aa, Severe acute respiratory syndrome coronavirus 2
  REGION 1..11: note = ORF3a 52-85; Min_EDGE_ORF3a_expl.; Table F
KIITLKKRWQL

SEQ ID NO: 27864 - protein, 9 aa, Severe acute respiratory syndrome coronavirus 2
  REGION 1..9: note = ORF3a 198-254; Min_EDGE_ORF3a_expl.; Table F
EPEEHVQIH

SEQ ID NO: 27865 - protein, 8 aa, Severe acute respiratory syndrome coronavirus 2
  REGION 1..8: note = ORF3a 12-55; Min_EDGE_ORF3a_expl.; Table F
TATIPIQA

SEQ ID NO: 27866 - protein, 9 aa, Severe acute respiratory syndrome coronavirus 2
  REGION 1..9: note = ORF3a 168-198; Min_EDGE_ORF3a_expl.; Table F
PISEHDYQI

SEQ ID NO: 27867 - protein, 10 aa, Severe acute respiratory syndrome coronavirus 2
  REGION 1..10: note = ORF3a 12-55; Min_EDGE_ORF3a_expl.; Table F
RATATIPIQA

SEQ ID NO: 27868 - protein, 8 aa, Severe acute respiratory syndrome coronavirus 2
  REGION 1..8: note = ORF3a 12-55; Min_EDGE_ORF3a_expl.; Table F
SDFVRATA

SEQ ID NO: 27869 - protein, 9 aa, Severe acute respiratory syndrome coronavirus 2
  REGION 1..9: note = ORF3a 198-254; Min_EDGE_ORF3a_expl.; Table F
VEHVTFFIY

SEQ ID NO: 27870 - protein, 9 aa, Severe acute respiratory syndrome coronavirus 2
  REGION 1..9: note = ORF3a 12-55; Min_EDGE_ORF3a_expl.; Table F
IKDATPSDF

SEQ ID NO: 27871 - protein, 9 aa, Severe acute respiratory syndrome coronavirus 2
  REGION 1..9: note = ORF3a 101-152; Min_EDGE_ORF3a_expl.; Table F
YFLQSINFV

SEQ ID NO: 27872 - protein, 8 aa, Severe acute respiratory syndrome coronavirus 2
  REGION 1..8: note = ORF3a 101-152; Min_EDGE_ORF3a_expl.; Table F
QSINFVRI

SEQ ID NO: 27873 - protein, 10 aa, Severe acute respiratory syndrome coronavirus 2
  REGION 1..10: note = ORF3a 101-152; Min_EDGE_ORF3a_expl.; Table F
KNPLLYDANY

SEQ ID NO: 27874 - protein, 8 aa, Severe acute respiratory syndrome coronavirus 2
  REGION 1..8: note = ORF3a 12-55; Min_EDGE_ORF3a_expl.; Table F
GEIKDATP

SEQ ID NO: 27875 - protein, 11 aa, Severe acute respiratory syndrome coronavirus 2
  REGION 1..11: note = ORF3a 12-55; Min_EDGE_ORF3a_expl.; Table F
LPFGWLIVGVA

SEQ ID NO: 27876 - protein, 11 aa, Severe acute respiratory syndrome coronavirus 2
  REGION 1..11: note = ORF3a 168-198; Min_EDGE_ORF3a_expl.; Table F
HDYQIGGYTEK

SEQ ID NO: 27877 - protein, 9 aa, Severe acute respiratory syndrome coronavirus 2
  REGION 1..9: note = ORF3a 12-55; Min_EDGE_ORF3a_expl.; Table F
DFVRATATI

SEQ ID NO: 27878 - protein, 8 aa, Severe acute respiratory syndrome coronavirus 2
  REGION 1..8: note = ORF3a 101-152; Min_EDGE_ORF3a_expl.; Table F
FLQSINFV

SEQ ID NO: 27879 - protein, 11 aa, Severe acute respiratory syndrome coronavirus 2
  REGION 1..11: note = ORF3a 101-152; Min_EDGE_ORF3a_expl.; Table F
YFLQSINFVRI

SEQ ID NO: 27880 - protein, 9 aa, Severe acute respiratory syndrome coronavirus 2
  REGION 1..9: note = ORF3a 198-254; Min_EDGE_ORF3a_expl.; Table F
DTGVEHVTF

SEQ ID NO: 27881 - protein, 9 aa, Severe acute respiratory syndrome coronavirus 2
  REGION 1..9: note = ORF3a 198-254; Min_EDGE_ORF3a_expl.; Table F
QLYSTQLST

SEQ ID NO: 27882 - protein, 8 aa, Severe acute respiratory syndrome coronavirus 2
  REGION 1..8: note = ORF3a 101-152; Min_EDGE_ORF3a_expl.; Table F
SINFVRII

SEQ ID NO: 27883 - protein, 11 aa, Severe acute respiratory syndrome coronavirus 2
  REGION 1..11: note = ORF3a 168-198; Min_EDGE_ORF3a_expl.; Table F
TTSPISEHDYQ

SEQ ID NO: 27884 - protein, 8 aa, Severe acute respiratory syndrome coronavirus 2
  REGION 1..8: note = ORF3a 12-55; Min_EDGE_ORF3a_expl.; Table F
DATPSDFV

SEQ ID NO: 27885 - protein, 8 aa, Severe acute respiratory syndrome coronavirus 2
  REGION 1..8: note = ORF3a 12-55; Min_EDGE_ORF3a_expl.; Table F
FGWLIVGV

SEQ ID NO: 27886 - protein, 9 aa, Severe acute respiratory syndrome coronavirus 2
  REGION 1..9: note = ORF3a 168-198; Min_EDGE_ORF3a_expl.; Table F
GTTSPISEH

SEQ ID NO: 27887 - protein, 11 aa, Severe acute respiratory syndrome coronavirus 2
  REGION 1..11: note = ORF3a 12-55; Min_EDGE_ORF3a_expl.; Table F
TPSDFVRATAT

SEQ ID NO: 27888 - protein, 10 aa, Severe acute respiratory syndrome coronavirus 2
  REGION 1..10: note = ORF3a 198-254; Min_EDGE_ORF3a_expl.; Table F
DYYQLYSTQL

SEQ ID NO: 27889 - protein, 9 aa, Severe acute respiratory syndrome coronavirus 2
  REGION 1..9: note = ORF3a 198-254; Min_EDGE_ORF3a_expl.; Table F
LSTDTGVEH

SEQ ID NO: 27890 - protein, 11 aa, Severe acute respiratory syndrome coronavirus 2
  REGION 1..11: note = ORF3a 198-254; Min_EDGE_ORF3a_expl.; Table F
EHVTFFIYNKI

SEQ ID NO: 27891 - protein, 9 aa, Severe acute respiratory syndrome coronavirus 2
  REGION 1..9: note = ORF3a 12-55; Min_EDGE_ORF3a_expl.; Table F
GEIKDATPS

SEQ ID NO: 27892 - protein, 8 aa, Severe acute respiratory syndrome coronavirus 2
  REGION 1..8: note = ORF3a 12-55; Min_EDGE_ORF3a_expl.; Table F
QASLPFGW

SEQ ID NO: 27893 - protein, 9 aa, Severe acute respiratory syndrome coronavirus 2
  REGION 1..9: note = ORF3a 101-152; Min_EDGE_ORF3a_expl.; Table F
FLYLYALVY

SEQ ID NO: 27894 - protein, 8 aa, Severe acute respiratory syndrome coronavirus 2
  REGION 1..8: note = ORF3a 101-152; Min_EDGE_ORF3a_expl.; Table F
LYLYALVY

SEQ ID NO: 27895 - protein, 9 aa, Severe acute respiratory syndrome coronavirus 2
  REGION 1..9: note = ORF3a 52-85; Min_EDGE_ORF3a_expl.; Table F
WQLALSKGV

SEQ ID NO: 27896 - protein, 8 aa, Severe acute respiratory syndrome coronavirus 2
  REGION 1..8: note = ORF3a 168-198; Min_EDGE_ORF3a_expl.; Table F
SPISEHDY

SEQ ID NO: 27897 - protein, 8 aa, Severe acute respiratory syndrome coronavirus 2
  REGION 1..8: note = ORF3a 168-198; Min_EDGE_ORF3a_expl.; Table F
HDYQIGGY

SEQ ID NO: 27898 - protein, 10 aa, Severe acute respiratory syndrome coronavirus 2
  REGION 1..10: note = ORF3a 12-55; Min_EDGE_ORF3a_expl.; Table F
DATPSDFVRA

SEQ ID NO: 27899 - protein, 11 aa, Severe acute respiratory syndrome coronavirus 2
  REGION 1..11: note = ORF3a 101-152; Min_EDGE_ORF3a_expl.; Table F
QSINFVRIIMR

SEQ ID NO: 27900 - protein, 8 aa, Severe acute respiratory syndrome coronavirus 2
  REGION 1..8: note = ORF3a 101-152; Min_EDGE_ORF3a_expl.; Table F
LYDANYFL

SEQ ID NO: 27901 - protein, 10 aa, Severe acute respiratory syndrome coronavirus 2
  REGION 1..10: note = ORF3a 168-198; Min_EDGE_ORF3a_expl.; Table F
EHDYQIGGYT

SEQ ID NO: 27902 - protein, 10 aa, Severe acute respiratory syndrome coronavirus 2
  REGION 1..10: note = ORF3a 168-198; Min_EDGE_ORF3a_expl.; Table F
DYQIGGYTEK

SEQ ID NO: 27903 - protein, 10 aa, Severe acute respiratory syndrome coronavirus 2
  REGION 1..10: note = ORF3a 198-254; Min_EDGE_ORF3a_expl.; Table F
LSTDTGVEHV

SEQ ID NO: 27904 - protein, 8 aa, Severe acute respiratory syndrome coronavirus 2
  REGION 1..8: note = ORF3a 198-254; Min_EDGE_ORF3a_expl.; Table F
EHVTFFIY

SEQ ID NO: 27905 - protein, 9 aa, Severe acute respiratory syndrome coronavirus 2
  REGION 1..9: note = ORF3a 198-254; Min_EDGE_ORF3a_expl.; Table F
DEPEEHVQI

SEQ ID NO: 27906 - protein, 8 aa, Severe acute respiratory syndrome coronavirus 2
  REGION 1..8: note = ORF3a 52-85; Min_EDGE_ORF3a_expl.; Table F
ASKIITLK

SEQ ID NO: 27907 - protein, 9 aa, Severe acute respiratory syndrome coronavirus 2
  REGION 1..9: note = ORF3a 12-55; Min_EDGE_ORF3a_expl.; Table F
LPFGWLIVG

SEQ ID NO: 27908 - protein, 9 aa, Severe acute respiratory syndrome coronavirus 2
  REGION 1..9: note = ORF3a 168-198; Min_EDGE_ORF3a_expl.; Table F
TSPISEHDY

SEQ ID NO: 27909 - protein, 8 aa, Severe acute respiratory syndrome coronavirus 2
  REGION 1..8: note = ORF3a 198-254; Min_EDGE_ORF3a_expl.; Table F
VTFFIYNK

SEQ ID NO: 27910 - protein, 8 aa, Severe acute respiratory syndrome coronavirus 2
  REGION 1..8: note = ORF3a 12-55; Min_EDGE_ORF3a_expl.; Table F
FVRATATI

SEQ ID NO: 27911 - protein, 9 aa, Severe acute respiratory syndrome coronavirus 2
  REGION 1..9: note = Min_Sette; Table F
LPNNTASWF

SEQ ID NO: 27912 - protein, 13 aa, Severe acute respiratory syndrome coronavirus 2
  REGION 1..13: note = Min_Sette; Table F
NTNSSPDDQIGYY

SEQ ID NO: 27913 - protein, 9 aa, Severe acute respiratory syndrome coronavirus 2
  REGION 1..9: note = Min_Sette; Table F
SPDDQIGYY

SEQ ID NO: 27914 - protein, 9 aa, Severe acute respiratory syndrome coronavirus 2
  REGION 1..9: note = Min_Sette; Table F
GTRNPANNA

SEQ ID NO: 27915 - protein, 9 aa, Severe acute respiratory syndrome coronavirus 2
  REGION 1..9: note = Min_Sette; Table F
KSAAEASKK

SEQ ID NO: 27916 - protein, 9 aa, Severe acute respiratory syndrome coronavirus 2
  REGION 1..9: note = Min_Sette; Table F
KAYNVTQAF

SEQ ID NO: 27917 - protein, 10 aa, Severe acute respiratory syndrome coronavirus 2
  REGION 1..10: note = Min_Sette; Table F
QELIRQGTDY

SEQ ID NO: 27918 - protein, 9 aa, Severe acute respiratory syndrome coronavirus 2
  REGION 1..9: note = Min_Sette; Table F
ELIRQGTDY

SEQ ID NO: 27919 - protein, 10 aa, Severe acute respiratory syndrome coronavirus 2
  REGION 1..10: note = Min_Sette; Table F
QFAPSASAFF

SEQ ID NO: 27920 - protein, 9 aa, Severe acute respiratory syndrome coronavirus 2
  REGION 1..9: note = Min_Sette; Table F
FAPSASAFF

SEQ ID NO: 27921 - protein, 10 aa, Severe acute respiratory syndrome coronavirus 2
  REGION 1..10: note = Min_Sette; Table F
APSASAFFGM

SEQ ID NO: 27922 - protein, 10 aa, Severe acute respiratory syndrome coronavirus 2
  REGION 1..10: note = Min_Sette; Table F
SASAFFGMSR

SEQ ID NO: 27923 - protein, 11 aa, Severe acute respiratory syndrome coronavirus 2
  REGION 1..11: note = Min_Sette; Table F
EVTPSGTWLTY

SEQ ID NO: 27924 - protein, 10 aa, Severe acute respiratory syndrome coronavirus 2
  REGION 1..10: note = Min_Sette; Table F
VTPSGTWLTY

SEQ ID NO: 27925 - protein, 9 aa, Severe acute respiratory syndrome coronavirus 2
  REGION 1..9: note = Min_Sette; Table F
TPSGTWLTY

SEQ ID NO: 27926 - protein, 10 aa, Severe acute respiratory syndrome coronavirus 2
  REGION 1..10: note = Min_Sette; Table F
YKTFPPTEPK

SEQ ID NO: 27927 - protein, 9 aa, Severe acute respiratory syndrome coronavirus 2
  REGION 1..9: note = Min_Sette; Table F
LPAADLDDF

SEQ ID NO: 27928 - protein, 9 aa, Severe acute respiratory syndrome coronavirus 2
  REGION 1..9: note = Min_Sette; Table F
ATIPIQASL

SEQ ID NO: 27929 - protein, 9 aa, Severe acute respiratory syndrome coronavirus 2
  REGION 1..9: note = Min_Sette; Table F
IPIQASLPF

SEQ ID NO: 27930 - protein, 8 aa, Severe acute respiratory syndrome coronavirus 2
  REGION 1..8: note = Min_Sette; Table F
LPFGWLIV

SEQ ID NO: 27931 - protein, 9 aa, Severe acute respiratory syndrome coronavirus 2
  REGION 1..9: note = Min_Sette; Table F
QSASKIITL

SEQ ID NO: 27932 - protein, 12 aa, Severe acute respiratory syndrome coronavirus 2
  REGION 1..12: note = Min_Sette; Table F
SASKIITLKKRW

SEQ ID NO: 27933 - protein, 9 aa, Severe acute respiratory syndrome coronavirus 2
  REGION 1..9: note = Min_Sette; Table F
ITLKKRWQL

SEQ ID NO: 27934 - protein, 9 aa, Severe acute respiratory syndrome coronavirus 2
  REGION 1..9: note = Min_Sette; Table F
LYLYALVYF

SEQ ID NO: 27935 - protein, 9 aa, Severe acute respiratory syndrome coronavirus 2
  REGION 1..9: note = Min_Sette; Table F
FVRIIMRLW

SEQ ID NO: 27936 - protein, 9 aa, Severe acute respiratory syndrome coronavirus 2
  REGION 1..9: note = Min_Sette; Table F
NPLLYDANY

SEQ ID NO: 27937 - protein, 9 aa, Severe acute respiratory syndrome coronavirus 2
  REGION 1..9: note = Min_Sette; Table F
HSYFTSDYY

SEQ ID NO: 27938 - protein, 10 aa, Severe acute respiratory syndrome coronavirus 2
  REGION 1..10: note = Min_Sette; Table F
YFTSDYYQLY

SEQ ID NO: 27939 - protein, 9 aa, Severe acute respiratory syndrome coronavirus 2
  REGION 1..9: note = Min_Sette; Table F
HVTFFIYNK

SEQ ID NO: 27940 - RNA, 80 nt, synthetic construct
  misc_feature 1..80: note = Description of Artificial Sequence: Synthetic oligonucleotide
  misc_feature 1..80: note = See specification as filed for detailed description of substitutions and preferred embodiments
  source 1..80: mol_type = other RNA
aaaaaaaaaaaaaaaaaaaaaaaaaaaaaaaaaaaaaaaaaaaaaaaaaaaaaaaaaaaaaaaaaaaaaaaaaaaaaaaa

SEQ ID NO: 27941 - protein, 10 aa, synthetic construct
  REGION 1..10: note = Description of Artificial Sequence: Synthetic peptide
  SITE 1..10: note = This sequence may encompass 2-10 residues
  REGION 1..10: note = See specification as filed for detailed description of substitutions and preferred embodiments
GGGGGGGGGG

SEQ ID NO: 27942 - protein, 10 aa, synthetic construct
  REGION 1..10: note = Description of Artificial Sequence: Synthetic peptide
  SITE 1..10: note = This sequence may encompass 2-10 residues
  REGION 1..10: note = See specification as filed for detailed description of substitutions and preferred embodiments
AAAAAAAAAA

SEQ ID NO: 27943 - RNA, 90 nt, synthetic construct
  misc_feature 1..90: note = Description of Artificial Sequence: Synthetic oligonucleotide
  misc_feature 1..90: note = This sequence may encompass 20-90 nucleotides
  misc_feature 1..90: note = See specification as filed for detailed description of substitutions and preferred embodiments
  source 1..90: mol_type = other RNA
aaaaaaaaaaaaaaaaaaaaaaaaaaaaaaaaaaaaaaaaaaaaaaaaaaaaaaaaaaaaaaaaaaaaaaaaaaaaaaaaaaaaaaaaaa

SEQ ID NO: 27944 - protein, 23 aa, Severe acute respiratory syndrome coronavirus 2
HIDAYKTFPPTEPKKDKKKKADE

SEQ ID NO: 27945 - protein, 17 aa, Severe acute respiratory syndrome coronavirus 2
CRSKNPLLYDANYFLCW

SEQ ID NO: 27946 - protein, 29 aa, Severe acute respiratory syndrome coronavirus 2
FEYYHTTDPSFLGRYMSALNHTKKWKYPQ

SEQ ID NO: 27947 - protein, 18 aa, Severe acute respiratory syndrome coronavirus 2
ISNEKQEILGTVSWNLRE

SEQ ID NO: 27948 - protein, 44 aa, Severe acute respiratory syndrome coronavirus 2
DIKDLPKEITVATSRTLSYYKLGASQRVAGDSGFAAYSRYRIGN

SEQ ID NO: 27949 - protein, 24 aa, Severe acute respiratory syndrome coronavirus 2
VRATATIPIQASLPFGWLIVGVAL

SEQ ID NO: 27950 - protein, 24 aa, Severe acute respiratory syndrome coronavirus 2
YLTFYLTNDVSFLAHIQWMVMFTP

SEQ ID NO: 27951 - protein, 21 aa, Severe acute respiratory syndrome coronavirus 2
GLMWLSYFIASFRLFARTRSM

SEQ ID NO: 27952 - protein, 19 aa, Severe acute respiratory syndrome coronavirus 2
DWYDFVENPDILRVYANLG

SEQ ID NO: 27953 - protein, 17 aa, Severe acute respiratory syndrome coronavirus 2
PYPNASFDNFKFVCDNI

SEQ ID NO: 27954 - protein, 21 aa, Severe acute respiratory syndrome coronavirus 2
NFNKDFYDFAVSKGFFKEGSS

SEQ ID NO: 27955 - protein, 18 aa, Severe acute respiratory syndrome coronavirus 2
DGVPFVVSTGYHFRELGV

SEQ ID NO: 27956 - protein, 27 aa, Severe acute respiratory syndrome coronavirus 2
ACPLIAAVITREVGFVVPGLPGTILRT

SEQ ID NO: 27957 - protein, 17 aa, Severe acute respiratory syndrome coronavirus 2
ATTRQVVNVVTTKIALK

SEQ ID NO: 27958 - protein, 20 aa, Severe acute respiratory syndrome coronavirus 2
SRIGMEVTPSGTWLTYTGAI

SEQ ID NO: 27959 - protein, 17 aa, Severe acute respiratory syndrome coronavirus 2
TLACFVLAAVYRINWIT

SEQ ID NO: 27960 - protein, 22 aa, Severe acute respiratory syndrome coronavirus 2
GGDGKMKDLSPRWYFYYLGTGP

SEQ ID NO: 27961 - protein, 27 aa, Severe acute respiratory syndrome coronavirus 2
GPLVRKIFVDGVPFVVSTGYHFRELGV

SEQ ID NO: 27962 - protein, 39 aa, Severe acute respiratory syndrome coronavirus 2
PVYSFLPGVYSVIYLYLTFYLTNDVSFLAHIQWMVMFTP

SEQ ID NO: 27963 - protein, 18 aa, Severe acute respiratory syndrome coronavirus 2
NNLDKSAGFPFNKWGKAR

SEQ ID NO: 27964 - protein, 19 aa, Severe acute respiratory syndrome coronavirus 2
TLACFVLAAVYRINWITGG

SEQ ID NO: 27965 - protein, 17 aa, Severe acute respiratory syndrome coronavirus 2
TYNKVENMTPRDLGACI

SEQ ID NO: 27966 - protein, 22 aa, Severe acute respiratory syndrome coronavirus 2
KQGDDYVYLPYPDPSRILGAGC

SEQ ID NO: 27967 - protein, 26 aa, Severe acute respiratory syndrome coronavirus 2
SLATVAYFNMVYMPASWVMRIMTWLD

SEQ ID NO: 27968 - protein, 17 aa, Severe acute respiratory syndrome coronavirus 2
GNCDTLKEILVTYNCCD

SEQ ID NO: 27969 - protein, 31 aa, Severe acute respiratory syndrome coronavirus 2
EAFEYYHTTDPSFLGRYMSALNHTKKWKYPQ

SEQ ID NO: 27970 - protein, 37 aa, Severe acute respiratory syndrome coronavirus 2
WPQIAQFAPSASAFFGMSRIGMEVTPSGTWLTYTGAI

SEQ ID NO: 27971 - protein, 60 aa, Severe acute respiratory syndrome coronavirus 2
ACPLIAAVITREVGFVVPGLPGTILRTTNGDFLHFLPRVFSAVGNICYTPSKLIEYTDFA

SEQ ID NO: 27972 - protein, 31 aa, Severe acute respiratory syndrome coronavirus 2
NVAFQTVKPGNFNKDFYDFAVSKGFFKEGSS

SEQ ID NO: 27973 - protein, 22 aa, Severe acute respiratory syndrome coronavirus 2
GASQRVAGDSGFAAYSRYRIGN
